(19) United States
(12) Patent Application Publication
(10) Pub. No.: US 2003/0008299 A1
(43) Pub. Date: Jan. 9, 2003

(54) Compositions and methods for the therapy and diagnosis of ovarian cancer

(75) Inventor: Paul A. Algate, Issaquah, WA (US)

Correspondence Address: SEED INTELLECTUAL PROPERTY LAW GROUP PLLC, 701 FIFTH AVE, SUITE 6300, SEATTLE, WA, 98104-7092, US

(73) Assignee: Corixa Corporation, Seattle, WA (US)

(21) Appl. No.: 10/015,219

(22) Filed: Dec. 12, 2001

Related U.S. Application Data
(63) Continuation-in-part of application No. 09/777,564, filed on Feb. 5, 2001.
(60) Provisional application No. 60/180,403, filed on Feb. 4, 2000.
(60) Provisional application No. 60/192,745, filed on Mar. 28, 2000.

(51) Int. Cl. C12Q 1/68; G01N 33/574; C07H 21/04; C12N 9/64; C12P 21/02; C12N 5/06

(52) U.S. Cl. 435/6; 435/7.23; 435/69.1; 435/226; 435/320.1; 435/325; 536/23.2

(57) ABSTRACT

Compositions and methods for the therapy and diagnosis of cancer, such as ovarian cancer, are disclosed. Compositions may comprise one or more ovarian tumor proteins, immunogenic portions thereof, or polynucleotides that encode such portions. Alternatively, a therapeutic composition may comprise an antigen presenting cell that expresses an ovarian tumor protein, or a T cell that is specific for cells expressing such a protein. Such compositions may be used, for example, for the prevention and treatment of diseases such as ovarian cancer. Diagnostic methods based on detecting an ovarian tumor protein, or mRNA encoding such a protein, in a sample are also provided.

### BACKGROUND OF THE INVENTION

[0001] 1. Field of the Invention

[0002] The present invention relates generally to therapy and diagnosis of cancer, such as ovarian tumors. The invention is more specifically related to polypeptides comprising at least a portion of an ovarian tumor protein, and to polynucleotides encoding such polypeptides. Such polypeptides and polynucleotides may be used in vaccines and pharmaceutical compositions for prevention and treatment of ovarian tumors, and for the diagnosis and monitoring of such cancers.

[0003] 2. Description of the Related Art

[0004] Cancer is a significant health problem throughout the world. Although advances have been made in detection and therapy of cancer, no vaccine or other universally successful method for prevention or treatment is currently available. Current therapies, which are generally based on a combination of chemotherapy or surgery and radiation, continue to prove inadequate in many patients.

[0005] Management of ovarian cancer currently relies on a combination of early diagnosis and aggressive treatment, which may include one or more of a variety of treatments such as surgery, radiotherapy, chemotherapy and hormone therapy. The course of treatment for a particular cancer is often selected based on a variety of prognostic parameters, including an analysis of specific tumor markers. However, the use of established markers often leads to a result that is difficult to interpret, and high mortality continues to be observed in many cancer patients.

[0006] Immunotherapies have the potential to substantially improve cancer treatment and survival. Such therapies may involve the generation or enhancement of an immune response to an ovarian carcinoma antigen. However, to date, relatively few ovarian carcinoma antigens are known and the generation of an immune response against such antigens has not been shown to be therapeutically beneficial. Thus, in spite of considerable research into therapies for these cancers, ovarian tumors remain difficult to diagnose and treat effectively. Accordingly, there is a need in the art for improved methods for detecting and treating such cancers. The present invention fulfills these needs and further provides other related advantages.

### BRIEF SUMMARY OF THE INVENTION

[0007] Briefly stated, the present invention provides compositions and methods for the diagnosis and therapy of cancer, such as ovarian cancer. In one aspect, the present invention provides polypeptides comprising at least a portion of an ovarian tumor protein, or a variant thereof. Certain portions and other variants are immunogenic, such that the ability of the variant to react with antigen-specific antisera is not substantially diminished. Within certain embodiments, the polypeptide comprises a sequence that is encoded by a polynucleotide sequence selected from the group consisting of: (a) sequences recited in SEQ ID NOs:1413-1737; (b) variants of a sequence recited in SEQ ID NO:1413-1737; and (c) complements of a sequence of (a) or (b).

[0008] The present invention further provides polynucleotides that encode a polypeptide as described above, or a portion thereof (such as a portion encoding at least 15 amino acid residues of an ovarian tumor protein), expression vectors comprising such polynucleotides and host cells transformed or transfected with such expression vectors.

[0009] Within other aspects, the present invention provides pharmaceutical compositions comprising a polypeptide or polynucleotide as described above and a physiologically acceptable carrier.

[0010] Within a related aspect of the present invention, vaccines for prophylactic or therapeutic use are provided. Such vaccines comprise a polypeptide or polynucleotide as described above and an immunostimulant.

[0011] The present invention further provides pharmaceutical compositions that comprise: (a) an antibody or antigen-binding fragment thereof that specifically binds to an ovarian tumor protein; and (b) a physiologically acceptable carrier.

[0012] Within further aspects, the present invention provides pharmaceutical compositions comprising: (a) an antigen presenting cell that expresses a polypeptide as described above and (b) a pharmaceutically acceptable carrier or excipient. Antigen presenting cells include dendritic cells, macrophages, monocytes, fibroblasts and B cells.

[0013] Within related aspects, vaccines are provided that comprise: (a) an antigen presenting cell that expresses a polypeptide as described above and (b) an immunostimulant.

[0014] The present invention further provides, in other aspects, fusion proteins that comprise at least one polypeptide as described above, as well as polynucleotides encoding such fusion proteins.

[0015] Within related aspects, pharmaceutical compositions comprising a fusion protein, or a polynucleotide encoding a fusion protein, in combination with a physiologically acceptable carrier are provided.

[0016] Vaccines are further provided, within other aspects, that comprise a fusion protein, or a polynucleotide encoding a fusion protein, in combination with an immunostimulant.

[0017] Within further aspects, the present invention provides methods for inhibiting the development of a cancer in a patient, comprising administering to a patient a pharmaceutical composition or vaccine as recited above. The patient may be afflicted with ovarian cancer, in which case the methods provide treatment for the disease, or patient considered at risk for such a disease may be treated prophylactically.

[0018] The present invention further provides, within other aspects, methods for removing tumor cells from a biological sample, comprising contacting a biological sample with T cells that specifically react with an ovarian tumor protein, wherein the step of contacting is performed under conditions and for a time sufficient to permit the removal of cells expressing the protein from the sample.

[0019] Within related aspects, methods are provided for inhibiting the development of a cancer in a patient, comprising administering to a patient a biological sample treated as described above.

[0020] Methods are further provided, within other aspects, for stimulating and/or expanding T cells specific for an ovarian tumor protein, comprising contacting T cells with one or more of: (i) a polypeptide as described above; (ii) a polynucleotide encoding such a polypeptide; and/or (iii) an antigen presenting cell that expresses such a polypeptide; under conditions and for a time sufficient to permit the stimulation and/or expansion of T cells. Isolated T cell populations comprising T cells prepared as described above are also provided.

[0021] Within further aspects, the present invention provides methods for inhibiting the development of a cancer in a patient, comprising administering to a patient an effective amount of a T cell population as described above.

[0022] The present invention further provides methods for inhibiting the development of a cancer in a patient, comprising the steps of: (a) incubating CD4⁺ and/or CD8⁺ T cells isolated from a patient with one or more of: (i) a polypeptide comprising at least an immunogenic portion of an ovarian tumor protein; (ii) a polynucleotide encoding such a polypeptide; and (iii) an antigen-presenting cell that expressed such a polypeptide; and (b) administering to the patient an effective amount of the proliferated T cells, and thereby inhibiting the development of a cancer in the patient. Proliferated cells may, but need not, be cloned prior to administration to the patient.

[0023] Within further aspects, the present invention provides methods for determining the presence or absence of a cancer in a patient, comprising: (a) contacting a biological sample obtained from a patient with a binding agent that binds to a polypeptide as recited above; (b) detecting in the sample an amount of polypeptide that binds to the binding agent; and (c) comparing the amount of polypeptide with a predetermined cut-off value, and therefrom determining the presence or absence of a cancer in the patient. Within preferred embodiments, the binding agent is an antibody, more preferably a monoclonal antibody. The cancer may be ovarian cancer.

[0024] The present invention also provides, within other aspects, methods for monitoring the progression of a cancer in a patient. Such methods comprise the steps of: (a) contacting a biological sample obtained from a patient at a first point in time with a binding agent that binds to a polypeptide as recited above; (b) detecting in the sample an amount of polypeptide that binds to the binding agent; (c) repeating steps (a) and (b) using a biological sample obtained from the patient at a subsequent point in time; and (d) comparing the amount of polypeptide detected in step (c) with the amount detected in step (b) and therefrom monitoring the progression of the cancer in the patient.

[0025] The present invention further provides, within other aspects, methods for determining the presence or absence of a cancer in a patient, comprising the steps of: (a) contacting a biological sample obtained from a patient with an oligonucleotide that hybridizes to a polynucleotide that encodes an ovarian tumor protein; (b) detecting in the sample a level of a polynucleotide, preferably mRNA, that hybridizes to the oligonucleotide; and (c) comparing the level of polynucleotide that hybridizes to the oligonucleotide with a predetermined cut-off value, and therefrom determining the presence or absence of a cancer in the patient. Within certain embodiments, the amount of mRNA is detected via polymerase chain reaction using, for example, at least one oligonucleotide primer that hybridizes to a polynucleotide encoding a polypeptide as recited above, or a complement of such a polynucleotide. Within other embodiments, the amount of mRNA is detected using a hybridization technique, employing an oligonucleotide probe that hybridizes to a polynucleotide that encodes a polypeptide as recited above, or a complement of such a polynucleotide.

[0026] In related aspects, methods are provided for monitoring the progression of a cancer in a patient, comprising the steps of: (a) contacting a biological sample obtained from a patient with an oligonucleotide that hybridizes to a polynucleotide that encodes an ovarian tumor protein; (b) detecting in the sample an amount of a polynucleotide that hybridizes to the oligonucleotide; (c) repeating steps (a) and (b) using a biological sample obtained from the patient at a subsequent point in time; and (d) comparing the amount of polynucleotide detected in step (c) with the amount detected in step (b) and therefrom monitoring the progression of the cancer in the patient.

[0027] Within further aspects, the present invention provides antibodies, such as monoclonal antibodies, that bind to a polypeptide as described above, as well as diagnostic kits comprising such antibodies. Diagnostic kits comprising one or more oligonucleotide probes or primers as described above are also provided.

[0028] These and other aspects of the present invention will become apparent upon reference to the following detailed description and attached drawings. All references disclosed herein are hereby incorporated by reference in their entirety as if each was incorporated individually.

### DETAILED DESCRIPTION OF THE INVENTION

[0029] As noted above, the present invention is generally directed to compositions and methods for using the compositions, for example in the therapy and diagnosis of cancer, such as ovarian cancer. Certain illustrative compositions described herein include ovarian tumor polypeptides, polynucleotides encoding such polypeptides, binding agents such as antibodies, antigen presenting cells (APCs) and/or immune system cells (e.g., T cells). An “ovarian tumor protein,” as the term is used herein, refers generally to a protein that is expressed in ovarian tumor cells at a level that is at least two fold, and preferably at least five fold, greater than the level of expression in a normal tissue, as determined using a representative assay provided herein. Certain ovarian tumor proteins are tumor proteins that react detectably (within an immunoassay, such as an ELISA or Western blot) with antisera of a patient afflicted with ovarian cancer.

[0030] Therefore, in accordance with the above, and as described further below, the present invention provides illustrative polynucleotide compositions having sequences set forth in SEQ ID Nos:1-1737, illustrative polypeptide compositions encoded by polynucleotides having the sequences set forth in SEQ ID Nos:1-1737, antibody compositions capable of binding such polypeptides, and numerous additional embodiments employing such compositions, for example in the detection, diagnosis and/or therapy of human ovarian cancer.

### Polynucleotide Compositions

[0031] As used herein, the terms “DNA segment” and “polynucloetide” refer to a DNA molecule that has been isolated free of total genomic DNA of a particular species. Therefore, a DNA segment encoding a polypeptide refers to a DNA segment that contains one or more coding sequences yet is substantially isolated away from, or purified free from, total genomic DNA of the species from which the DNA segment is obtained. Included within the terms “DNA segment” and “polynucleotide” are DNA segments and smaller fragments of such segments, and also recombinant vectors, including, for example, plasmids, cosmids, phagemids, phage, viruses, and the like.

[0032] As will be understood by those skilled in the art, the DNA segments of this invention can include genomic sequences, extra-genomic and plasmid-encoded sequences and smaller engineered gene segments that express, or may be adapted to express, proteins, polypeptides, peptides and the like. Such segments may be naturally isolated, or modified synthetically by the hand of man.

[0033] “Isolated,” as used herein, means that a polynucleotide is substantially away from other coding sequences, and that the DNA segment does not contain large portions of unrelated coding DNA, such as large chromosomal fragments or other functional genes or polypeptide coding regions. Of course, this refers to the DNA segment as originally isolated, and does not exclude genes or coding regions later added to the segment by the hand of man.

[0034] As will be recognized by the skilled artisan, polynucleotides may be single-stranded (coding or antisense) or double-stranded, and may be DNA (genomic, cDNA or synthetic) or RNA molecules. RNA molecules include HnRNA molecules, which contain introns and correspond to a DNA molecule in a one-to-one manner, and mRNA molecules, which do not contain introns. Additional coding or non-coding sequences may, but need not, be present within a polynucleotide of the present invention, and a polynucleotide may, but need not, be linked to other molecules and/or support materials.

[0035] Polynucleotides may comprise a native sequence (i.e., an endogenous sequence that encodes an ovarian tumor protein or a portion thereof) or may comprise a variant or a biological or antigenic functional equivalent of such a sequence. Polynucleotide variants may contain one or more substitutions, additions, deletions and/or insertions, as further described below, preferably such that the immunogenicity of the encoded polypeptide is not diminished, relative to a native tumor protein. The effect on the immunogenicity of the encoded polypeptide may generally be assessed as described herein. The term “variants” also encompasses homologous genes of xenogenic origin.

[0036] When comparing polynucleotide or polypeptide sequences, two sequences are said to be “identical” if the sequence of nucleotides or amino acids in the two sequences is the same when aligned for maximum correspondence, as described below. Comparisons between two sequences are typically performed by comparing the sequences over a comparison window to identify and compare local regions of sequence similarity. A “comparison window” as used herein, refers to a segment of at least about 20 contiguous positions, usually 30 to about 75, 40 to about 50, in which a sequence may be compared to a reference sequence of the same number of contiguous positions after the two sequences are optimally aligned.

[0037] Optimal alignment of sequences for comparison may be conducted using the Megalign program in the Lasergene suite of bioinformatics software (DNASTAR, Inc., Madison, Wis.), using default parameters. This program embodies several alignment schemes described in the following references: Dayhoff, M. O. (1978) A model of evolutionary change in proteins—Matrices for detecting distant relationships. In Dayhoff, M. O. (ed.) Atlas of Protein Sequence and Structure, National Biomedical Research Foundation, Washington D.C. Vol. 5, Suppl. 3, pp. 345-358; Hein J. (1990) Unified Approach to Alignment and Phylogenes pp. 626-645 Methods in Enzymology vol. 183, Academic Press, Inc., San Diego, Calif.; Higgins, D. G. and Sharp, P. M. (1989) CABIOS 5:151-153; Myers, E. W. and Muller W. (1988) CABIOS 4:11-17; Robinson, E. D. (1971) Comb. Theor 11:105; Saitou, N. Nei, M. (1987) Mol. Biol. Evol. 4:406-425; Sneath, P. H. A. and Sokal, R. R. (1973) Numerical Taxonomy—the Principles and Practice of Numerical Taxonomy, Freeman Press, San Francisco, Calif.; Wilbur, W. J. and Lipman, D. J. (1983) Proc. Natl. Acad., Sci. USA 80:726-730.

[0038] Alternatively, optimal alignment of sequences for comparison may be conducted by the local identity algorithm of Smith and Waterman (1981) Add. APL. Math 2:482, by the identity alignment algorithm of Needleman and Wunsch (1970) J. Mol. Biol. 48:443, by the search for similarity methods of Pearson and Lipman (1988) Proc. Natl. Acad. Sci. (U.S.A.) 85: 2444, by computerized implementations of these algorithms (GAP, BESTFIT, BLAST, FASTA, and TFASTA in the Wisconsin Genetics Software Package, Genetics Computer Group (GCG), 575 Science Dr., Madison, Wis.), or by inspection.

[0039] One preferred example of algorithms that are suitable for determining percent sequence identity and sequence similarity are the BLAST and BLAST 2.0 algorithms, which are described in Altschul et al. (1977) Nuc. Acids Res. 25:3389-3402 and Altschul et al. (1990) J. Mol. Biol. 215:403-410, respectively. BLAST and BLAST 2.0 can be used, for example with the parameters described herein, to determine percent sequence identity for the polynucleotides and polypeptides of the invention. Software for performing BLAST analyses is publicly available through the National Center for Biotechnology Information (http://www.ncbi.nlm.nih.gov/) In one illustrative example, cumulative scores can be calculated using, for nucleotide sequences, the parameters M (reward score for a pair of matching residues; always >0) and N (penalty score for mismatching residues; always <0). For amino acid sequences, a scoring matrix can be used to calculate the cumulative score. Extension of the word hits in each direction are halted when: the cumulative alignment score falls off by the quantity X from its maximum achieved value; the cumulative score goes to zero or below, due to the accumulation of one or more negative-scoring residue alignments; or the end of either sequence is reached. The BLAST algorithm parameters W, T and X determine the sensitivity and speed of the alignment. The BLASTN program (for nucleotide sequences) uses as defaults a wordlength (W) of 11, and expectation (E) of 10, and the BLOSUM62 scoring matrix (see Henikoff and Henikoff (1989) Proc. Natl. Acad. Sci. USA 89:10915) alignments, (B) of 50, expectation (E) of 10, M=5, N=−4 and a comparison of both strands.

[0040] Preferably, the “percentage of sequence identity” is determined by comparing two optimally aligned sequences over a window of comparison of at least 20 positions, wherein the portion of the polynucleotide or polypeptide sequence in the comparison window may comprise additions or deletions (i.e., gaps) of 20 percent or less, usually 5 to 15 percent, or 10 to 12 percent, as compared to the reference sequences (which does not comprise additions or deletions) for optimal alignment of the two sequences. The percentage is calculated by determining the number of positions at which the identical nucleic acid bases or amino acid residue occurs in both sequences to yield the number of matched positions, dividing the number of matched positions by the total number of positions in the reference sequence (i.e., the window size) and multiplying the results by 100 to yield the percentage of sequence identity.

[0041] Therefore, the present invention encompasses polynucleotide and polypeptide sequences having substantial identity to the sequences disclosed herein, for example those comprising at least 50% or more sequence identity, preferably at least 55%, 60%, 65%, 70%, 75%, 80%, 85%, 90%, 95%, 96%, 97%, 98%, or 99% or higher, sequence identity compared to a polynucleotide or polypeptide sequence of this invention using the methods described herein, (e.g., BLAST analyisis using standard parameters, as described below). One skilled in this art will recognize that these values can be appropriately adjusted to determine corresponding identity of proteins encoded by two nucleotide sequences by taking into account codon degeneracy, amino acid similarity, reading frame positioning and the like.

[0042] In additional embodiments, the present invention provides isolated polynucleotides and polypeptides comprising various lengths of contiguous stretches of sequence identical to or complementary to one or more of the sequences disclosed herein. For example, polynucleotides are provided by this invention that comprise at least about 15, 20, 30, 40, 50, 75, 100, 150, 200, 300, 400, 500 or 1000 or more contiguous nucleotides of one or more of the sequences disclosed herein as well as all intermediate lengths therebetween. It will be readily understood that “intermediate lengths”, in this context, means any length between the quoted values, such as 16, 17, 18, 19, etc.; 21, 22, 23, etc.; 30, 31, 32, etc.; 50, 51, 52, 53, etc.; 100, 101, 102, 103, etc.; 150, 151, 152, 153, etc.; including all integers through the 200-500; 500-1,000, and the like.

[0043] The polynucleotides of the present invention, or fragments thereof, regardless of the length of the coding sequence itself, may be combined with other DNA sequences, such as promoters, polyadenylation signals, additional restriction enzyme sites, multiple cloning sites, other coding segments, and the like, such that their overall length may vary considerably. It is therefore contemplated that a nucleic acid fragment of almost any length may be employed, with the total length preferably being limited by the ease of preparation and use in the intended recombinant DNA protocol. For example, illustrative DNA segments with total lengths of about 10,000, about 5000, about 3000, about 2,000, about 1,000, about 500, about 200, about 100, about 50 base pairs in length, and the like, (including all intermediate lengths) are contemplated to be useful in many implementations of this invention.

[0044] In other embodiments, the present invention is directed to polynucleotides that are capable of hybridizing under moderately stringent conditions to a polynucleotide sequence provided herein, or a fragment thereof, or a complementary sequence thereof. Hybridization techniques are well known in the art of molecular biology. For purposes of illustration, suitable moderately stringent conditions for testing the hybridization of a polynucleotide of this invention with other polynucleotides include prewashing in a solution of 5×SSC, 0.5% SDS, 1.0 mM EDTA (pH 8.0); hybridizing at 50° C.-65° C., 5×SSC, overnight; followed by washing twice at 65° C. for 20 minutes with each of 2×, 0.5× and 0.2× SSC containing 0.1% SDS.

[0045] Moreover, it will be appreciated by those of ordinary skill in the art that, as a result of the degeneracy of the genetic code, there are many nucleotide sequences that encode a polypeptide as described herein. Some of these polynucleotides bear minimal homology to the nucleotide sequence of any native gene. Nonetheless, polynucleotides that vary due to differences in codon usage are specifically contemplated by the present invention. Further, alleles of the genes comprising the polynucleotide sequences provided herein are within the scope of the present invention. Alleles are endogenous genes that are altered as a result of one or more mutations, such as deletions, additions and/or substitutions of nucleotides. The resulting mRNA and protein may, but need not, have an altered structure or function. Alleles may be identified using standard techniques (such as hybridization, amplification and/or database sequence comparison).

### Probes and Primers

[0046] In other embodiments of the present invention, the polynucleotide sequences provided herein can be advantageously used as probes or primers for nucleic acid hybridization. As such, it is contemplated that nucleic acid segments that comprise a sequence region of at least about a 15 nucleotide long contiguous sequence that has the same sequence as, or is complementary to, a 15 nucleotide long contiguous sequence disclosed herein will find particular utility. Longer contiguous identical or complementary sequences, e.g., those of about 20, 30, 40, 50, 100, 200, 500, 1000 (including all intermediate lengths) and even up to full length sequences will also be of use in certain embodiments.

[0047] The ability of such nucleic acid probes to specifically hybridize to a sequence of interest will enable them to be of use in detecting the presence of complementary sequences in a given sample. However, other uses are also envisioned, such as the use of the sequence information for the preparation of mutant species primers, or primers for use in preparing other genetic constructions.

[0048] Polynucleotide molecules having sequence regions consisting of contiguous nucleotide stretches of 10-14, 15-20, 30, 50, or even of 100-200 nucleotides or so (including intermediate lengths as well), identical or complementary to SEQ ID NOs: 1-1737, are particularly contemplated as hybridization probes for use in, e.g., Southern and Northern blotting. This would allow a gene product, or fragment thereof, to be analyzed, both in diverse cell types and also in various bacterial cells. The total size of fragment, as well as the size of the complementary stretch(es), will ultimately depend on the intended use or application of the particular nucleic acid segment. Smaller fragments will generally find use in hybridization embodiments, wherein the length of the contiguous complementary region may be varied, such as between about 15 and about 100 nucleotides, but larger contiguous complementarity stretches may be used, according to the length complementary sequences one wishes to detect.

[0049] The use of a hybridization probe of about 15-25 nucleotides in length allows the formation of a duplex molecule that is both stable and selective. Molecules having contiguous complementary sequences over stretches greater than 15 bases in length are generally preferred, though, in order to increase stability and selectivity of the hybrid, and thereby improve the quality and degree of specific hybrid molecules obtained. One will generally prefer to design nucleic acid molecules having gene-complementary stretches of 15 to 25 contiguous nucleotides, or even longer where desired.

[0050] Hybridization probes may be selected from any portion of any of the sequences disclosed herein. All that is required is to review the sequence set forth in SEQ ID NOs:1-1737, or to any continuous portion of the sequence, from about 15-25 nucleotides in length up to and including the full length sequence, that one wishes to utilize as a probe or primer. The choice of probe and primer sequences may be governed by various factors, such as, by way of example only, one may wish to employ primers from towards the termini of the total sequence.

[0051] Small polynucleotide segments or fragments may be readily prepared by, for example, directly synthesizing the fragment by chemical means, as is commonly practiced using an automated oligonucleotide synthesizer. Also, fragments may be obtained by application of nucleic acid reproduction technology, such as the PCR™ technology of U.S. Pat. No. 4,683,202 (incorporated herein by reference), by introducing selected sequences into recombinant vectors for recombinant production, and by other recombinant DNA techniques generally known to those of skill in the art of molecular biology.

[0052] The nucleotide sequences of the invention may be used for their ability to selectively form duplex molecules with complementary stretches of the entire gene or gene fragments of interest. Depending on the application envisioned, one will typically desire to employ varying conditions of hybridization to achieve varying degrees of selectivity of probe towards target sequence. For applications requiring high selectivity, one will typically desire to employ relatively stringent conditions to form the hybrids, e.g., one will select relatively low salt and/or high temperature conditions, such as provided by a salt concentration of from about 0.02 M to about 0.15 M salt at temperatures of from about 50° C. to about 70° C. Such selective conditions tolerate little, if any, mismatch between the probe and the template or target strand, and would be particularly suitable for isolating related sequences.

[0053] Of course, for some applications, for example, where one desires to prepare mutants employing a mutant primer strand hybridized to an underlying template, less stringent (reduced stringency) hybridization conditions will typically be needed in order to allow formation of the heteroduplex. In these circumstances, one may desire to employ salt conditions such as those of from about 0.15 M to about 0.9 M salt, at temperatures ranging from about 20° C. to about 55° C. Cross-hybridizing species can thereby be readily identified as positively hybridizing signals with respect to control hybridizations. In any case, it is generally appreciated that conditions can be rendered more stringent by the addition of increasing amounts of formamide, which serves to destabilize the hybrid duplex in the same manner as increased temperature. Thus, hybridization conditions can be readily manipulated, and thus will generally be a method of choice depending on the desired results.

### Polynucleotide Identification and Characterization

[0054] Polynucleotides may be identified, prepared and/or manipulated using any of a variety of well established techniques. For example, a polynucleotide may be identified, as described in more detail below, by screening a microarray of cDNAs for tumor-associated expression (i.e., expression that is at least two fold greater in a tumor than in normal tissue, as determined using a representative assay provided herein). Such screens may be performed, for example, using a Synteni microarray (Palo Alto, Calif.) according to the manufacturer's instructions (and essentially as described by Schena et al., Proc. Natl. Acad. Sci. USA 93:10614-10619, 1996 and Heller et al., Proc. Natl. Acad. Sci. USA 94:2150-2155, 1997). Alternatively, polynucleotides may be amplified from cDNA prepared from cells expressing the proteins described herein, such as ovarian tumor cells. Such polynucleotides may be amplified via polymerase chain reaction (PCR). For this approach, sequence-specific primers may be designed based on the sequences provided herein, and may be purchased or synthesized.

[0055] An amplified portion of a polyncleotide of the present invention may be used to isolate a full length gene from a suitable library (e.g., an ovarian tumor cDNA library) using well known techniques. Within such techniques, a library (cDNA or genomic) is screened using one or more polynucleotide probes or primers suitable for amplification. Preferably, a library is size-selected to include larger molecules. Random primed libraries may also be preferred for identifying 5′ and upstream regions of genes. Genomic libraries are preferred for obtaining introns and extending 5′ sequences.

[0056] For hybridization techniques, a partial sequence may be labeled (e.g., by nick-translation or end-labeling with ³²P) using well known techniques. A bacterial or bacteriophage library is then generally screened by hybridizing filters containing denatured bacterial colonies (or lawns containing phage plaques) with the labeled probe (see Sambrook et al., Molecular Cloning: A Laboratory Manual, Cold Spring Harbor Laboratories, Cold Spring Harbor, N.Y., 1989). Hybridizing colonies or plaques are selected and expanded, and the DNA is isolated for further analysis. cDNA clones may be analyzed to determine the amount of additional sequence by, for example, PCR using a primer from the partial sequence and a primer from the vector. Restriction maps and partial sequences may be generated to identify one or more overlapping clones. The complete sequence may then be determined using standard techniques, which may involve generating a series of deletion clones. The resulting overlapping sequences can then assembled into a single contiguous sequence. A full length cDNA molecule can be generated by ligating suitable fragments, using well known techniques.

[0057] Alternatively, there are numerous amplification techniques for obtaining a full length coding sequence from a partial cDNA sequence. Within such techniques, amplification is generally performed via PCR. Any of a variety of commercially available kits may be used to perform the amplification step. Primers may be designed using, for example, software well known in the art. Primers are preferably 22-30 nucleotides in length, have a GC content of at least 50% and anneal to the target sequence at temperatures of about 68° C. to 72° C. The amplified region may be sequenced as described above, and overlapping sequences assembled into a contiguous sequence.

[0058] One such amplification technique is inverse PCR (see Triglia et al., Nucl. Acids Res. 16:8186, 1988), which uses restriction enzymes to generate a fragment in the known region of the gene. The fragment is then circularized by intramolecular ligation and used as a template for PCR with divergent primers derived from the known region. Within an alternative approach, sequences adjacent to a partial sequence may be retrieved by amplification with a primer to a linker sequence and a primer specific to a known region. The amplified sequences are typically subjected to a second round of amplification with the same linker primer and a second primer specific to the known region. A variation on this procedure, which employs two primers that initiate extension in opposite directions from the known sequence, is described in WO 96/38591. Another such technique is known as “rapid amplification of cDNA ends” or RACE. This technique involves the use of an internal primer and an external primer, which hybridizes to a polyA region or vector sequence, to identify sequences that are 5′ and 3′ of a known sequence. Additional techniques include capture PCR (Lagerstrom et al., PCR Methods Applic. 1:111-19, 1991) and walking PCR (Parker et al., Nucl. Acids. Res. 19:3055-60, 1991). Other methods employing amplification may also be employed to obtain a full length cDNA sequence.

[0059] In certain instances, it is possible to obtain a full length cDNA sequence by analysis of sequences provided in an expressed sequence tag (EST) database, such as that available from GenBank. Searches for overlapping ESTs may generally be performed using well known programs (e.g., NCBI BLAST searches), and such ESTs may be used to generate a contiguous full length sequence. Full length DNA sequences may also be obtained by analysis of genomic fragments.

### Polynucleotide Expression in Host Cells

[0060] In other embodiments of the invention, polynucleotide sequences or fragments thereof which encode polypeptides of the invention, or fusion proteins or functional equivalents thereof, may be used in recombinant DNA molecules to direct expression of a polypeptide in appropriate host cells. Due to the inherent degeneracy of the genetic code, other DNA sequences that encode substantially the same or a functionally equivalent amino acid sequence may be produced and these sequences may be used to clone and express a given polypeptide.

[0061] As will be understood by those of skill in the art, it may be advantageous in some instances to produce polypeptide-encoding nucleotide sequences possessing non-naturally occurring codons. For example, codons preferred by a particular prokaryotic or eukaryotic host can be selected to increase the rate of protein expression or to produce a recombinant RNA transcript having desirable properties, such as a half-life which is longer than that of a transcript generated from the naturally occurring sequence.

[0062] Moreover, the polynucleotide sequences of the present invention can be engineered using methods generally known in the art in order to alter polypeptide encoding sequences for a variety of reasons, including but not limited to, alterations which modify the cloning, processing, and/or expression of the gene product. For example, DNA shuffling by random fragmentation and PCR reassembly of gene fragments and synthetic oligonucleotides may be used to engineer the nucleotide sequences. In addition, site-directed mutagenesis may be used to insert new restriction sites, alter glycosylation patterns, change codon preference, produce splice variants, or introduce mutations, and so forth.

[0063] In another embodiment of the invention, natural, modified, or recombinant nucleic acid sequences may be ligated to a heterologous sequence to encode a fusion protein. For example, to screen peptide libraries for inhibitors of polypeptide activity, it may be useful to encode a chimeric protein that can be recognized by a commercially available antibody. A fusion protein may also be engineered to contain a cleavage site located between the polypeptide-encoding sequence and the heterologous protein sequence, so that the polypeptide may be cleaved and purified away from the heterologous moiety.

[0064] Sequences encoding a desired polypeptide may be synthesized, in whole or in part, using chemical methods well known in the art (see Caruthers, M. H. et al. (1980) Nucl. Acids Res. Symp. Ser. 215-223, Horn, T. et al. (1980) Nucl. Acids Res. Symp. Ser. 225-232). Alternatively, the protein itself may be produced using chemical methods to synthesize the amino acid sequence of a polypeptide, or a portion thereof. For example, peptide synthesis can be performed using various solid-phase techniques (Roberge, J. Y. et al. (1995) Science 269:202-204) and automated synthesis may be achieved, for example, using the ABI 431A Peptide Synthesizer (Perkin Elmer).

[0065] A newly synthesized peptide may be substantially purified by preparative high performance liquid chromatography (e.g., Creighton, T. (1983) Proteins, Structures and Molecular Principles, W H Freeman and Co., New York, N.Y.) or other comparable techniques available in the art. The composition of the synthetic peptides may be confirmed by amino acid analysis or sequencing (e.g., the Edman degradation procedure). Additionally, the amino acid sequence of a polypeptide, or any part thereof, may be altered during direct synthesis and/or combined using chemical methods with sequences from other proteins, or any part thereof, to produce a variant polypeptide.

[0066] In order to express a desired polypeptide, the nucleotide sequences encoding the polypeptide, or functional equivalents, may be inserted into appropriate expression vector, i.e., a vector which contains the necessary elements for the transcription and translation of the inserted coding sequence. Methods which are well known to those skilled in the art may be used to construct expression vectors containing sequences encoding a polypeptide of interest and appropriate transcriptional and translational control elements. These methods include in vitro recombinant DNA techniques, synthetic techniques, and in vivo genetic recombination. Such techniques are described in Sambrook, J. et al. (1989) Molecular Cloning, A Laboratory Manual, Cold Spring Harbor Press, Plainview, N.Y., and Ausubel, F. M. et al. (1989) Current Protocols in Molecular Biology, John Wiley & Sons, New York. N.Y.

[0067] A variety of expression vector/host systems may be utilized to contain and express polynucleotide sequences. These include, but are not limited to, microorganisms such as bacteria transformed with recombinant bacteriophage, plasmid, or cosmid DNA expression vectors; yeast transformed with yeast expression vectors; insect cell systems infected with virus expression vectors (e.g., baculovirus); plant cell systems transformed with virus expression vectors (e.g., cauliflower mosaic virus, CaMV; tobacco mosaic virus, TMV) or with bacterial expression vectors (e.g. Ti or pBR322 plasmids); or animal cell systems.

[0068] The “control elements” or “regulatory sequences” present in an expression vector are those non-translated regions of the vector—enhancers, promoters, 5′ and 3′ untranslated regions—which interact with host cellular proteins to carry out transcription and translation. Such elements may vary in their strength and specificity. Depending on the vector system and host utilized, any number of suitable transcription and translation elements, including constitutive and inducible promoters, may be used. For example, when cloning in bacterial systems, inducible promoters such as the hybrid lacZ promoter of the PBLUESCRIPT phagemid (Stratagene, LaJolla, Calif.) or PSPORT1 plasmid (Gibco BRL) and the like may be used. In mammalian cell systems, promoters from mammalian genes or from mammalian viruses are generally preferred. If it is necessary to generate a cell line that contains multiple copies of the sequence encoding a polypeptide, vectors based on SV40 or EBV may be advantageously used with an appropriate selectable marker.

[0069] In bacterial systems, a number of expression vectors may be selected depending upon the use intended for the expressed polypeptide. For example, when large quantities are needed, for example for the induction of antibodies, vectors which direct high level expression of fusion proteins that are readily purified may be used. Such vectors include, but are not limited to, the multifunctional E. coli cloning and expression vectors such as BLUESCRIPT (Stratagene), in which the sequence encoding the polypeptide of interest may be ligated into the vector in frame with sequences for the amino-terminal Met and the subsequent 7 residues of .beta.-galactosidase so that a hybrid protein is produced; pIN vectors (Van Heeke, G. and S. M. Schuster (1989) J. Biol. Chem. 264:5503-5509); and the like. pGEX vectors (Promega, Madison, Wis.) may also be used to express foreign polypeptides as fusion proteins with glutathione S-transferase (GST). In general, such fusion proteins are soluble and can easily be purified from lysed cells by adsorption to glutathione-agarose beads followed by elution in the presence of free glutathione. Proteins made in such systems may be designed to include heparin, thrombin, or factor XA protease cleavage sites so that the cloned polypeptide of interest can be released from the GST moiety at will.

[0070] In the yeast, Saccharomyces cerevisiae, a number of vectors containing constitutive or inducible promoters such as alpha factor, alcohol oxidase, and PGH may be used. For reviews, see Ausubel et al. (supra) and Grant et al. (1987) Methods Enzymol. 153:516-544.

[0071] In cases where plant expression vectors are used, the expression of sequences encoding polypeptides may be driven by any of a number of promoters. For example, viral promoters such as the 35S and 19S promoters of CaMV may be used alone or in combination with the omega leader sequence from TMV (Takamatsu, N. (1987) EMBO J. 6:307-311. Alternatively, plant promoters such as the small subunit of RUBISCO or heat shock promoters may be used (Coruzzi, G. et al. (1984) EMBO J. 3:1671-1680; Broglie, R. et al. (1984) Science 224:838-843; and Winter, J. et al. (1991) Results Probl. Cell Differ. 17:85-105). These constructs can be introduced into plant cells by direct DNA transformation or pathogen-mediated transfection. Such techniques are described in a number of generally available reviews (see, for example, Hobbs, S. or Murry, L. E. in McGraw Hill Yearbook of Science and Technology (1992) McGraw Hill, New York, N.Y.; pp. 191-196).

[0072] An insect system may also be used to express a polypeptide of interest. For example, in one such system, Autographa califomica nuclear polyhedrosis virus (AcNPV) is used as a vector to express foreign genes in Spodoptera frugiperda cells or in Trichoplusia larvae. The sequences encoding the polypeptide may be cloned into a non-essential region of the virus, such as the polyhedrin gene, and placed under control of the polyhedrin promoter. Successful insertion of the polypeptide-encoding sequence will render the polyhedrin gene inactive and produce recombinant virus lacking coat protein. The recombinant viruses may then be used to infect, for example, S. frugiperda cells or Trichoplusia larvae in which the polypeptide of interest may be expressed (Engelhard, E. K. et al. (1994) Proc. Nat. Acad. Sci. 91 :3224-3227).

[0073] In mammalian host cells, a number of viral-based expression systems are generally available. For example, in cases where an adenovirus is used as an expression vector, sequences encoding a polypeptide of interest may be ligated into an adenovirus transcription/translation complex consisting of the late promoter and tripartite leader sequence. Insertion in a non-essential E1 or E3 region of the viral genome may be used to obtain a viable virus which is capable of expressing the polypeptide in infected host cells (Logan, J. and Shenk, T. (1984) Proc. Natl. Acad. Sci. 81:3655-3659). In addition, transcription enhancers, such as the Rous sarcoma virus (RSV) enhancer, may be used to increase expression in mammalian host cells.

[0074] Specific initiation signals may also be used to achieve more efficient translation of sequences encoding a polypeptide of interest. Such signals include the ATG initiation codon and adjacent sequences. In cases where sequences encoding the polypeptide, its initiation codon, and upstream sequences are inserted into the appropriate expression vector, no additional transcriptional or translational control signals may be needed. However, in cases where only coding sequence, or a portion thereof, is inserted, exogenous translational control signals including the ATG initiation codon should be provided. Furthermore, the initiation codon should be in the correct reading frame to ensure translation of the entire insert. Exogenous translational elements and initiation codons may be of various origins, both natural and synthetic. The efficiency of expression may be enhanced by the inclusion of enhancers which are appropriate for the particular cell system which is used, such as those described in the literature (Scharf, D. et al. (1994) Results Probl. Cell Differ. 20:125-162).

[0075] In addition, a host cell strain may be chosen for its ability to modulate the expression of the inserted sequences or to process the expressed protein in the desired fashion. Such modifications of the polypeptide include, but are not limited to, acetylation, carboxylation. glycosylation, phosphorylation, lipidation, and acylation. Post-translational processing which cleaves a “prepro” form of the protein may also be used to facilitate correct insertion, folding and/or function. Different host cells such as CHO, HeLa, MDCK, HEK293, and W138, which have specific cellular machinery and characteristic mechanisms for such post-translational activities, may be chosen to ensure the correct modification and processing of the foreign protein.

[0076] For long-term, high-yield production of recombinant proteins, stable expression is generally preferred. For example, cell lines which stably express a polynucleotide of interest may be transformed using expression vectors which may contain viral origins of replication and/or endogenous expression elements and a selectable marker gene on the same or on a separate vector. Following the introduction of the vector, cells may be allowed to grow for 1-2 days in an enriched media before they are switched to selective media. The purpose of the selectable marker is to confer resistance to selection, and its presence allows growth and recovery of cells which successfully express the introduced sequences. Resistant clones of stably transformed cells may be proliferated using tissue culture techniques appropriate to the cell type.

[0077] Any number of selection systems may be used to recover transformed cell lines. These include, but are not limited to, the herpes simplex virus thymidine kinase (Wigler, M. et al. (1977) Cell 11:223-32) and adenine phosphoribosyltransferase (Lowy, I. et al. (1990) Cell 22:817-23) genes which can be employed in tk.sup.- or aprt.sup.-cells, respectively. Also, antimetabolite, antibiotic or herbicide resistance can be used as the basis for selection; for example, dhfr which confers resistance to methotrexate (Wigler, M. et al. (1980) Proc. Natl. Acad. Sci. 77:3567-70); npt, which confers resistance to the aminoglycosides, neomycin and G-418 (Colbere-Garapin, F. et al (1981) J. Mol. Biol. 150:1-14); and als or pat, which confer resistance to chlorsulfuron and phosphinotricin acetyltransferase, respectively (Murry, supra). Additional selectable genes have been described, for example, trpB, which allows cells to utilize indole in place of tryptophan, or hisD, which allows cells to utilize histinol in place of histidine (Hartman, S. C. and R. C. Mulligan (1988) Proc. Natl. Acad. Sci. 85:8047-51). Recently, the use of visible markers has gained popularity with such markers as anthocyanins, beta. glucuronidase and its substrate GUS, and luciferase and its substrate luciferin, being widely used not only to identify transformants, but also to quantify the amount of transient or stable protein expression attributable to a specific vector system (Rhodes, C. A. et al. (1995) Methods Mol. Biol. 55:121-131).

[0078] Although the presence/absence of marker gene expression suggests that the gene of interest is also present, its presence and expression may need to be confirmed. For example, if the sequence encoding a polypeptide is inserted within a marker gene sequence, recombinant cells containing sequences can be identified by the absence of marker gene function. Alternatively, a marker gene can be placed in tandem with a polypeptide-encoding sequence under the control of a single promoter. Expression of the marker gene in response to induction or selection usually indicates expression of the tandem gene as well.

[0079] Alternatively, host cells which contain and express a desired polynucleotide sequence may be identified by a variety of procedures known to those of skill in the art. These procedures include, but are not limited to, DNA-DNA or DNA-RNA hybridizations and protein bioassay or immunoassay techniques which include membrane, solution, or chip based technologies for the detection and/or quantification of nucleic acid or protein.

[0080] A variety of protocols for detecting and measuring the expression of polynucleotide-encoded products, using either polyclonal or monoclonal antibodies specific for the product are known in the art. Examples include enzyme-linked immunosorbent assay (ELISA), radioimmunoassay (RIA), and fluorescence activated cell sorting (FACS). A two-site, monoclonal-based immunoassay utilizing monoclonal antibodies reactive to two non-interfering epitopes on a given polypeptide may be preferred for some applications, but a competitive binding assay may also be employed. These and other assays are described, among other places, in Hampton, R. et al. (1990; Serological Methods, a Laboratory Manual, APS Press, St Paul. Minn.) and Maddox, D. E. et al. (1983; J. Exp. Med. 158:1211-1216).

[0081] A wide variety of labels and conjugation techniques are known by those skilled in the art and may be used in various nucleic acid and amino acid assays. Means for producing labeled hybridization or PCR probes for detecting sequences related to polynucleotides include oligolabeling, nick translation, end-labeling or PCR amplification using a labeled nucleotide. Alternatively, the sequences, or any portions thereof may be cloned into a vector for the production of an mRNA probe. Such vectors are known in the art, are commercially available, and may be used to synthesize RNA probes in vitro by addition of an appropriate RNA polymerase such as T7, T3, or SP6 and labeled nucleotides. These procedures may be conducted using a variety of commercially available kits Amersham Pharmacia Biotech, Promega, and US Biochemical Corp. Suitable reporter molecules or labels, which may be used, include radionuclides, enzymes, fluorescent, chemiluminescent, or chromogenic agents as well as substrates, cofactors, inhibitors, magnetic particles, and the like.

[0082] Host cells transformed with a polynucleotide sequence of interest may be cultured under conditions suitable for the expression and recovery of the protein from cell culture. The protein produced by a recombinant cell may be secreted or contained intracellularly depending on the sequence and/or the vector used. As will be understood by those of skill in the art, expression vectors containing polynucleotides of the invention may be designed to contain signal sequences which direct secretion of the encoded polypeptide through a prokaryotic or eukaryotic cell membrane. Other recombinant constructions may be used to join sequences encoding a polypeptide of interest to nucleotide sequence encoding a polypeptide domain which will facilitate purification of soluble proteins. Such purification facilitating domains include, but are not limited to, metal chelating peptides such as histidine-tryptophan modules that allow purification on immobilized metals, protein A domains that allow purification on immobilized immunoglobulin, and the domain utilized in the FLAGS extension/affinity purification system (Immunex Corp., Seattle, Wash.). The inclusion of cleavable linker sequences such as those specific for Factor XA or enterokinase (Invitrogen. San Diego, Calif.) between the purification domain and the encoded polypeptide may be used to facilitate purification. One such expression vector provides for expression of a fusion protein containing a polypeptide of interest and a nucleic acid encoding 6 histidine residues preceding a thioredoxin or an enterokinase cleavage site. The histidine residues facilitate purification on IMIAC (immobilized metal ion affinity chromatography) as described in Porath, J. et al. (1992, Prot. Exp. Purif. 3: 263-281) while the enterokinase cleavage site provides a means for purifying the desired polypeptide from the fusion protein. A discussion of vectors which contain fusion proteins is provided in Kroll, D. J. et al. (1993; DNA Cell Biol. 12:441-453).

[0083] In addition to recombinant production methods, polypeptides of the invention, and fragments thereof, may be produced by direct peptide synthesis using solid-phase techniques (Merrifield J. (1963) J. Am. Chem. Soc. 85:2149-2154). Protein synthesis may be performed using manual techniques or by automation. Automated synthesis may be achieved, for example, using Applied Biosystems 431 A Peptide Synthesizer (Perkin Elmer). Alternatively, various fragments may be chemically synthesized separately and combined using chemical methods to produce the full length molecule.

### Site-Specific Mutagenesis

[0084] Site-specific mutagenesis is a technique useful in the preparation of individual peptides, or biologically functional equivalent polypeptides, through specific mutagenesis of the underlying polynucleotides that encode them. The technique, well-known to those of skill in the art, further provides a ready ability to prepare and test sequence variants, for example, incorporating one or more of the foregoing considerations, by introducing one or more nucleotide sequence changes into the DNA. Site-specific mutagenesis allows the production of mutants through the use of specific oligonucleotide sequences which encode the DNA sequence of the desired mutation, as well as a sufficient number of adjacent nucleotides, to provide a primer sequence of sufficient size and sequence complexity to form a stable duplex on both sides of the deletion junction being traversed. Mutations may be employed in a selected polynucleotide sequence to improve, alter, decrease, modify, or otherwise change the properties of the polynucleotide itself, and/or alter the properties, activity, composition, stability, or primary sequence of the encoded polypeptide.

[0085] In certain embodiments of the present invention, the inventors contemplate the mutagenesis of the disclosed polynucleotide sequences to alter one or more properties of the encoded polypeptide, such as the antigenicity of a polypeptide vaccine. The techniques of site-specific mutagenesis are well-known in the art, and are widely used to create variants of both polypeptides and polynucleotides. For example, site-specific mutagenesis is often used to alter a specific portion of a DNA molecule. In such embodiments, a primer comprising typically about 14 to about 25 nucleotides or so in length is employed, with about 5 to about 10 residues on both sides of the junction of the sequence being altered.

[0086] As will be appreciated by those of skill in the art, site-specific mutagenesis techniques have often employed a phage vector that exists in both a single stranded and double stranded form. Typical vectors useful in site-directed mutagenesis include vectors such as the M13 phage. These phage are readily commercially-available and their use is generally well-known to those skilled in the art. Double-stranded plasmids are also routinely employed in site directed mutagenesis that eliminates the step of transferring the gene of interest from a plasmid to a phage.

[0087] In general, site-directed mutagenesis in accordance herewith is performed by first obtaining a single-stranded vector or melting apart of two strands of a double-stranded vector that includes within its sequence a DNA sequence that encodes the desired peptide. An oligonucleotide primer bearing the desired mutated sequence is prepared, generally synthetically. This primer is then annealed with the single-stranded vector, and subjected to DNA polymerizing enzymes such as E. coli polymerase I Klenow fragment, in order to complete the synthesis of the mutation-bearing strand. Thus, a heteroduplex is formed wherein one strand encodes the original non-mutated sequence and the second strand bears the desired mutation. This heteroduplex vector is then used to transform appropriate cells, such as E. coli cells, and clones are selected which include recombinant vectors bearing the mutated sequence arrangement.

[0088] The preparation of sequence variants of the selected peptide-encoding DNA segments using site-directed mutagenesis provides a means of producing potentially useful species and is not meant to be limiting as there are other ways in which sequence variants of peptides and the DNA sequences encoding them may be obtained. For example, recombinant vectors encoding the desired peptide sequence may be treated with mutagenic agents, such as hydroxylamine, to obtain sequence variants. Specific details regarding these methods and protocols are found in the teachings of Maloy et al., 1994; Segal, 1976; Prokop and Bajpai, 1991; Kuby, 1994; and Maniatis et al., 1982, each incorporated herein by reference, for that purpose.

[0089] As used herein, the term “oligonucleotide directed mutagenesis procedure” refers to template-dependent processes and vector-mediated propagation which result in an increase in the concentration of a specific nucleic acid molecule relative to its initial concentration, or in an increase in the concentration of a detectable signal, such as amplification. As used herein, the term “oligonucleotide directed mutagenesis procedure” is intended to refer to a process that involves the template-dependent extension of a primer molecule. The term template dependent process refers to nucleic acid synthesis of an RNA or a DNA molecule wherein the sequence of the newly synthesized strand of nucleic acid is dictated by the well-known rules of complementary base pairing (see, for example, Watson, 1987). Typically, vector mediated methodologies involve the introduction of the nucleic acid fragment into a DNA or RNA vector, the clonal amplification of the vector, and the recovery of the amplified nucleic acid fragment. Examples of such methodologies are provided by U.S. Pat. No. 4,237,224, specifically incorporated herein by reference in its entirety.

### Polynucleotide Amplification Techniques

[0090] A number of template dependent processes are available to amplify the target sequences of interest present in a sample. One of the best known amplification methods is the polymerase chain reaction (PCR™) which is described in detail in U.S. Pat. Nos. 4,683,195, 4,683,202 and 4,800,159, each of which is incorporated herein by reference in its entirety. Briefly, in PCR™, two primer sequences are prepared which are complementary to regions on opposite complementary strands of the target sequence. An excess of deoxynucleoside triphosphates is added to a reaction mixture along with a DNA polymerase (e.g., Taq polymerase). If the target sequence is present in a sample, the primers will bind to the target and the polymerase will cause the primers to be extended along the target sequence by adding on nucleotides. By raising and lowering the temperature of the reaction mixture, the extended primers will dissociate from the target to form reaction products, excess primers will bind to the target and to the reaction product and the process is repeated. Preferably reverse transcription and PCR™ amplification procedure may be performed in order to quantify the amount of mRNA amplified. Polymerase chain reaction methodologies are well known in the art.

[0091] Another method for amplification is the ligase chain reaction (referred to as LCR), disclosed in Eur. Pat. Appl. Publ. No. 320,308 (specifically incorporated herein by reference in its entirety). In LCR, two complementary probe pairs are prepared, and in the presence of the target sequence, each pair will bind to opposite complementary strands of the target such that they abut. In the presence of a ligase, the two probe pairs will link to form a single unit. By temperature cycling, as in PCR™, bound ligated units dissociate from the target and then serve as “target sequences” for ligation of excess probe pairs. U.S. Pat. No. 4,883,750, incorporated herein by reference in its entirety, describes an alternative method of amplification similar to LCR for binding probe pairs to a target sequence.

[0092] Qbeta Replicase, described in PCT Intl. Pat. Appl. Publ. No. PCT/US87/00880, incorporated herein by reference in its entirety, may also be used as still another amplification method in the present invention. In this method, a replicative sequence of RNA that has a region complementary to that of a target is added to a sample in the presence of an RNA polymerase. The polymerase will copy the replicative sequence that can then be detected.

[0093] An isothermal amplification method, in which restriction endonucleases and ligases are used to achieve the amplification of target molecules that contain nucleotide 5′-[α-thio]triphosphates in one strand of a restriction site (Walker et al., 1992, incorporated herein by reference in its entirety), may also be useful in the amplification of nucleic acids in the present invention.

[0094] Strand Displacement Amplification (SDA) is another method of carrying out isothermal amplification of nucleic acids which involves multiple rounds of strand displacement and synthesis, i.e. nick translation. A similar method, called Repair Chain Reaction (RCR) is another method of amplification which may be useful in the present invention and is involves annealing several probes throughout a region targeted for amplification, followed by a repair reaction in which only two of the four bases are present. The other two bases can be added as biotinylated derivatives for easy detection. A similar approach is used in SDA.

[0095] Sequences can also be detected using a cyclic probe reaction (CPR). In CPR, a probe having a 3′ and 5′ sequences of non-target DNA and an internal or “middle” sequence of the target protein specific RNA is hybridized to DNA which is present in a sample. Upon hybridization, the reaction is treated with RNaseH, and the products of the probe are identified as distinctive products by generating a signal that is released after digestion. The original template is annealed to another cycling probe and the reaction is repeated. Thus, CPR involves amplifying a signal generated by hybridization of a probe to a target gene specific expressed nucleic acid.

[0096] Still other amplification methods described in Great Britain Pat. Appl. No. 2 202 328, and in PCT Intl. Pat. Appl. Publ. No. PCT/US89/01025, each of which is incorporated herein by reference in its entirety, may be used in accordance with the present invention. In the former application, “modified” primers are used in a PCR-like, template and enzyme dependent synthesis. The primers may be modified by labeling with a capture moiety (e.g., biotin) and/or a detector moiety (e.g., enzyme). In the latter application, an excess of labeled probes is added to a sample. In the presence of the target sequence, the probe binds and is cleaved catalytically. After cleavage, the target sequence is released intact to be bound by excess probe. Cleavage of the labeled probe signals the presence of the target sequence.

[0097] Other nucleic acid amplification procedures include transcription-based amplification systems (TAS) (Kwoh et al., 1989; PCT Intl. Pat. Appl. Publ. No. WO 88/10315, incorporated herein by reference in its entirety), including nucleic acid sequence based amplification (NASBA) and 3SR. In NASBA, the nucleic acids can be prepared for amplification by standard phenol/chloroform extraction, heat denaturation of a sample, treatment with lysis buffer and minispin columns for isolation of DNA and RNA or guanidinium chloride extraction of RNA. These amplification techniques involve annealing a primer that has sequences specific to the target sequence. Following polymerization, DNA/RNA hybrids are digested with RNase H while double stranded DNA molecules are heat-denatured again. In either case the single stranded DNA is made fully double stranded by addition of second target-specific primer, followed by polymerization. The double stranded DNA molecules are then multiply transcribed by a polymerase such as T7 or SP6. In an isothermal cyclic reaction, the RNAs are reverse transcribed into DNA, and transcribed once again with a polymerase such as T7 or SP6. The resulting products, whether truncated or complete, indicate target-specific sequences.

[0098] Eur. Pat. Appl. Publ. No. 329,822, incorporated herein by reference in its entirety, disclose a nucleic acid amplification process involving cyclically synthesizing single-stranded RNA (“ssRNA”), ssDNA, and double-stranded DNA (dsDNA), which may be used in accordance with the present invention. The ssRNA is a first template for a first primer oligonucleotide, which is elongated by reverse transcriptase (RNA-dependent DNA polymerase). The RNA is then removed from resulting DNA:RNA duplex by the action of ribonuclease H (RNase H, an RNase specific for RNA in a duplex with either DNA or RNA). The resultant ssDNA is a second template for a second primer, which also includes the sequences of an RNA polymerase promoter (exemplified by T7 RNA polymerase) 5′ to its homology to its template. This primer is then extended by DNA polymerase (exemplified by the large “Klenow” fragment of E. coli DNA polymerase I), resulting as a double-stranded DNA (“dsDNA”) molecule, having a sequence identical to that of the original RNA between the primers and having additionally, at one end, a promoter sequence. This promoter sequence can be used by the appropriate RNA polymerase to make many RNA copies of the DNA. These copies can then re-enter the cycle leading to very swift amplification. With proper choice of enzymes, this amplification can be done isothermally without addition of enzymes at each cycle. Because of the cyclical nature of this process, the starting sequence can be chosen to be in the form of either DNA or RNA.

[0099] PCT Intl. Pat. Appl. Publ. No. WO 89/06700, incorporated herein by reference in its entirety, disclose a nucleic acid sequence amplification scheme based on the hybridization of a promoter/primer sequence to a target single-stranded DNA (“ssDNA”) followed by transcription of many RNA copies of the sequence. This scheme is not cyclic; i.e. new templates are not produced from the resultant RNA transcripts. Other amplification methods include “RACE” (Frohman, 1990), and “one-sided PCR” (Ohara, 1989) which are well-known to those of skill in the art.

[0100] Methods based on ligation of two (or more) oligonucleotides in the presence of nucleic acid having the sequence of the resulting “di-oligonucleotide”, thereby amplifying the di-oligonucleotide (Wu and Dean, 1996, incorporated herein by reference in its entirety), may also be used in the amplification of DNA sequences of the present invention.

### Biological Functional Equivalents

[0101] Modification and changes may be made in the structure of the polynucleotides and polypeptides of the present invention and still obtain a functional molecule that encodes a polypeptide with desirable characteristics. As mentioned above, it is often desirable to introduce one or more mutations into a specific polynucleotide sequence. In certain circumstances, the resulting encoded polypeptide sequence is altered by this mutation, or in other cases, the sequence of the polypeptide is unchanged by one or more mutations in the encoding polynucleotide.

[0102] When it is desirable to alter the amino acid sequence of a polypeptide to create an equivalent, or even an improved, second-generation molecule, the amino acid changes may be achieved by changing one or more of the codons of the encoding DNA sequence, according to Table 1.

[0103] For example, certain amino acids may be substituted for other amino acids in a protein structure without appreciable loss of interactive binding capacity with structures such as, for example, antigen-binding regions of antibodies or binding sites on substrate molecules. Since it is the interactive capacity and nature of a protein that defines that protein's biological functional activity, certain amino acid sequence substitutions can be made in a protein sequence, and, of course, its underlying DNA coding sequence, and nevertheless obtain a protein with like properties. It is thus contemplated by the inventors that various changes may be made in the peptide sequences of the disclosed compositions, or corresponding DNA sequences which encode said peptides without appreciable loss of their biological utility or activity.

TABLE 1

| Amino Acids | | | Codons | | | | | |
|---|---|---|---|---|---|---|---|---|
| Alanine | Ala | A | GCA | GCC | GCG | GCU | | |
| Cysteine | Cys | C | UGC | UGU | | | | |
| Aspartic acid | Asp | D | GAC | GAU | | | | |
| Glutamic acid | Glu | E | GAA | GAG | | | | |
| Phenylalanine | Phe | F | UUC | UUU | | | | |
| Glycine | Gly | G | GGA | GGC | GGG | GGU | | |
| Histidine | His | H | CAC | CAU | | | | |
| Isoleucine | Ile | I | AUA | AUC | AUU | | | |
| Lysine | Lys | K | AAA | AAG | | | | |
| Leucine | Leu | L | UUA | UUG | CUA | CUC | CUG | CUU |
| Methionine | Met | M | AUG | | | | | |
| Asparagine | Asn | N | AAC | AAU | | | | |
| Proline | Pro | P | CCA | CCC | CCG | CCU | | |
| Glutamine | Gln | Q | CAA | CAG | | | | |
| Arginine | Arg | R | AGA | AGG | CGA | CGC | CGG | CGU |
| Serine | Ser | S | AGC | AGU | UCA | UCC | UCG | UCU |
| Threonine | Thr | T | ACA | ACC | ACG | ACU | | |
| Valine | Val | V | GUA | GUC | GUG | GUU | | |
| Tryptophan | Trp | W | UGG | | | | | |
| Tyrosine | Tyr | Y | UAC | UAU | | | | |

[0104] In making such changes, the hydropathic index of amino acids may be considered. The importance of the hydropathic amino acid index in conferring interactive biologic function on a protein is generally understood in the art (Kyte and Doolittle, 1982, incorporate herein by reference). It is accepted that the relative hydropathic character of the amino acid contributes to the secondary structure of the resultant protein, which in turn defines the interaction of the protein with other molecules, for example, enzymes, substrates, receptors, DNA, antibodies, antigens, and the like. Each amino acid has been assigned a hydropathic index on the basis of its hydrophobicity and charge characteristics (Kyte and Doolittle, 1982). These values are: isoleucine (+4.5); valine (+4.2); leucine (+3.8); phenylalanine (+2.8); cysteine/cystine (+2.5); methionine (+1.9); alanine (+1.8); glycine (−0.4); threonine (−0.7); serine (−0.8); tryptophan (−0.9); tyrosine (−1.3); proline (−1.6); histidine (−3.2); glutamate (−3.5); glutamine (−3.5); aspartate (−3.5); asparagine (−3.5); lysine (−3.9); and arginine (−4.5).

[0105] It is known in the art that certain amino acids may be substituted by other amino acids having a similar hydropathic index or score and still result in a protein with similar biological activity, i.e. still obtain a biological functionally equivalent protein. In making such changes, the substitution of amino acids whose hydropathic indices are within ±2 is preferred, those within ±1 are particularly preferred, and those within ±0.5 are even more particularly preferred. It is also understood in the art that the substitution of like amino acids can be made effectively on the basis of hydrophilicity. U.S. Pat. No. 4,554,101 (specifically incorporated herein by reference in its entirety), states that the greatest local average hydrophilicity of a protein, as governed by the hydrophilicity of its adjacent amino acids, correlates with a biological property of the protein.

[0106] As detailed in U.S. Pat. No. 4,554,101, the following hydrophilicity values have been assigned to amino acid residues: arginine (+3.0); lysine (+3.0); aspartate (+3.0±1); glutamate (+3.0±1); serine (+0.3); asparagine (+0.2); glutamine (+0.2); glycine (0); threonine (−0.4); proline (−0.5±1); alanine (−0.5); histidine (−0.5); cysteine (−1.0); methionine (−1.3); valine (−1.5); leucine (−1.8); isoleucine (−1.8); tyrosine (−2.3); phenylalanine (−2.5); tryptophan (−3.4). It is understood that an amino acid can be substituted for another having a similar hydrophilicity value and still obtain a biologically equivalent, and in particular, an immunologically equivalent protein. In such changes, the substitution of amino acids whose hydrophilicity values are within ±2 is preferred, those within ±1 are particularly preferred, and those within ±0.5 are even more particularly preferred.

[0107] As outlined above, amino acid substitutions are generally therefore based on the relative similarity of the amino acid side-chain substituents, for example, their hydrophobicity, hydrophilicity, charge, size, and the like. Exemplary substitutions that take various of the foregoing characteristics into consideration are well known to those of skill in the art and include: arginine and lysine; glutamate and aspartate; serine and threonine; glutamine and asparagine; and valine, leucine and isoleucine.

[0108] In addition, any polynucleotide may be further modified to increase stability in vivo. Possible modifications include, but are not limited to, the addition of flanking sequences at the 5′ and/or 3′ ends; the use of phosphorothioate or 2′ O-methyl rather than phosphodiesterase linkages in the backbone; and/or the inclusion of nontraditional bases such as inosine, queosine and wybutosine, as well as acetyl- methyl-, thio- and other modified forms of adenine, cytidine, guanine, thymine and uridine.

### In Vivo Polynucleotide Delivery Techniques

[0109] In additional embodiments, genetic constructs comprising one or more of the polynucleotides of the invention are introduced into cells in vivo. This may be achieved using any of a variety or well known approaches, several of which are outlined below for the purpose of illustration.

[0110] 1. Adenovirus

[0111] One of the preferred methods for in vivo delivery of one or more nucleic acid sequences involves the use of an adenovirus expression vector. “Adenovirus expression vector” is meant to include those constructs containing adenovirus sequences sufficient to (a) support packaging of the construct and (b) to express a polynucleotide that has been cloned therein in a sense or antisense orientation. Of course, in the context of an antisense construct, expression does not require that the gene product be synthesized.

[0112] The expression vector comprises a genetically engineered form of an adenovirus. Knowledge of the genetic organization of adenovirus, a 36 kb, linear, double-stranded DNA virus, allows substitution of large pieces of adenoviral DNA with foreign sequences up to 7 kb (Grunhaus and Horwitz, 1992). In contrast to retrovirus, the adenoviral infection of host cells does not result in chromosomal integration because adenoviral DNA can replicate in an episomal manner without potential genotoxicity. Also, adenoviruses are structurally stable, and no genome rearrangement has been detected after extensive amplification. Adenovirus can infect virtually all epithelial cells regardless of their cell cycle stage. So far, adenoviral infection appears to be linked only to mild disease such as acute respiratory disease in humans.

[0113] Adenovirus is particularly suitable for use as a gene transfer vector because of its mid-sized genome, ease of manipulation, high titer, wide target-cell range and high infectivity. Both ends of the viral genome contain 100-200 base pair inverted repeats (ITRs), which are cis elements necessary for viral DNA replication and packaging. The early (E) and late (L) regions of the genome contain different transcription units that are divided by the onset of viral DNA replication. The E1 region (E1A and E1B) encodes proteins responsible for the regulation of transcription of the viral genome and a few cellular genes. The expression of the E2 region (E2A and E2B) results in the synthesis of the proteins for viral DNA replication. These proteins are involved in DNA replication, late gene expression and host cell shut-off (Renan, 1990). The products of the late genes, including the majority of the viral capsid proteins, are expressed only after significant processing of a single primary transcript issued by the major late promoter (MLP). The MLP, (located at 16.8 m.u.) is particularly efficient during the late phase of infection, and all the mRNA's issued from this promoter possess a 5′-tripartite leader (TPL) sequence which makes them preferred mRNA's for translation.

[0114] In a current system, recombinant adenovirus is generated from homologous recombination between shuttle vector and provirus vector. Due to the possible recombination between two proviral vectors, wild-type adenovirus may be generated from this process. Therefore, it is critical to isolate a single clone of virus from an individual plaque and examine its genomic structure.

[0115] Generation and propagation of the current adenovirus vectors, which are replication deficient, depend on a unique helper cell line, designated 293, which was transformed from human embryonic kidney cells by Ad5 DNA fragments and constitutively expresses El proteins (Graham et al., 1977). Since the E3 region is dispensable from the adenovirus genome (Jones and Shenk, 1978), the current adenovirus vectors, with the help of 293 cells, carry foreign DNA in either the E1, the D3 or both regions (Graham and Prevec, 1991). In nature, adenovirus can package approximately 105% of the wild-type genome (Ghosh-Choudhury et al., 1987), providing capacity for about 2 extra kB of DNA. Combined with the approximately 5.5 kB of DNA that is replaceable in the E1 and E3 regions, the maximum capacity of the current adenovirus vector is under 7.5 kB, or about 15% of the total length of the vector. More than 80% of the adenovirus viral genome remains in the vector backbone and is the source of vector-borne cytotoxicity. Also, the replication deficiency of the E1-deleted virus is incomplete. For example, leakage of viral gene expression has been observed with the currently available vectors at high multiplicities of infection (MOI) (Mulligan, 1993).

[0116] Helper cell lines may be derived from human cells such as human embryonic kidney cells, muscle cells, hematopoietic cells or other human embryonic mesenchymal or epithelial cells. Alternatively, the helper cells may be derived from the cells of other mammalian species that are permissive for human adenovirus. Such cells include, e.g., Vero cells or other monkey embryonic mesenchymal or epithelial cells. As stated above, the currently preferred helper cell line is 293.

[0117] Recently, Racher et al. (1995) disclosed improved methods for culturing 293 cells and propagating adenovirus. In one format, natural cell aggregates are grown by inoculating individual cells into 1 liter siliconized spinner flasks (Techne, Cambridge, UK) containing 100-200 ml of medium. Following stirring at 40 rpm, the cell viability is estimated with trypan blue. In another format, Fibra-Cel microcarriers (Bibby Sterlin, Stone, UK) (5 g/l) is employed as follows. A cell inoculum, resuspended in 5 ml of medium, is added to the carrier (50 ml) in a 250 ml Erlenmeyer flask and left stationary, with occasional agitation, for 1 to 4 h. The medium is then replaced with 50 ml of fresh medium and shaking initiated. For virus production, cells are allowed to grow to about 80% confluence, after which time the medium is replaced (to 25% of the final volume) and adenovirus added at an MOI of 0.05. Cultures are left stationary overnight, following which the volume is increased to 100% and shaking commenced for another 72 h.

[0118] Other than the requirement that the adenovirus vector be replication defective, or at least conditionally defective, the nature of the adenovirus vector is not believed to be crucial to the successful practice of the invention. The adenovirus may be of any of the 42 different known serotypes or subgroups A-F. Adenovirus type 5 of subgroup C is the preferred starting material in order to obtain the conditional replication-defective adenovirus vector for use in the present invention. This is because Adenovirus type 5 is a human adenovirus about which a great deal of biochemical and genetic information is known, and it has historically been used for most constructions employing adenovirus as a vector.

[0119] As stated above, the typical vector according to the present invention is replication defective and will not have an adenovirus E1 region. Thus, it will be most convenient to introduce the polynucleotide encoding the gene of interest at the position from which the E1-coding sequences have been removed. However, the position of insertion of the construct within the adenovirus sequences is not critical to the invention. The polynucleotide encoding the gene of interest may also be inserted in lieu of the deleted E3 region in E3 replacement vectors as described by Karlsson et al. (1986) or in the E4 region where a helper cell line or helper virus complements the E4 defect.

[0120] Adenovirus is easy to grow and manipulate and exhibits broad host range in vitro and in vivo. This group of viruses can be obtained in high titers, e.g., 10⁹-10¹¹ plaque-forming units per ml, and they are highly infective. The life cycle of adenovirus does not require integration into the host cell genome. The foreign genes delivered by adenovirus vectors are episomal and, therefore, have low genotoxicity to host cells. No side effects have been reported in studies of vaccination with wild-type adenovirus (Couch et al., 1963; Top et al., 1971), demonstrating their safety and therapeutic potential as in vivo gene transfer vectors.

[0121] Adenovirus vectors have been used in eukaryotic gene expression (Levrero et al., 1991; Gomez-Foix et al., 1992) and vaccine development (Grunhaus and Horwitz, 1992; Graham and Prevec, 1992). Recently, animal studies suggested that recombinant adenovirus could be used for gene therapy (Stratford-Perricaudet and Perricaudet, 1991; Stratford-Perricaudet et al., 1990; Rich et al., 1993). Studies in administering recombinant adenovirus to different tissues include trachea instillation (Rosenfeld et al., 1991; Rosenfeld et al., 1992), muscle injection (Ragot et al., 1993), peripheral intravenous injections (Herz and Gerard, 1993) and stereotactic inoculation into the brain (Le Gal La Salle et al., 1993).

[0122] 2. Retroviruses

[0123] The retroviruses are a group of single-stranded RNA viruses characterized by an ability to convert their RNA to double-stranded DNA in infected cells by a process of reverse-transcription (Coffin, 1990). The resulting DNA then stably integrates into cellular chromosomes as a provirus and directs synthesis of viral proteins. The integration results in the retention of the viral gene sequences in the recipient cell and its descendants. The retroviral genome contains three genes, gag, pol, and env that code for capsid proteins, polymerase enzyme, and envelope components, respectively. A sequence found upstream from the gag gene contains a signal for packaging of the genome into virions. Two long terminal repeat (LTR) sequences are present at the 5′ and 3′ ends of the viral genome. These contain strong promoter and enhancer sequences and are also required for integration in the host cell genome (Coffin, 1990).

[0124] In order to construct a retroviral vector, a nucleic acid encoding one or more oligonucleotide or polynucleotide sequences of interest is inserted into the viral genome in the place of certain viral sequences to produce a virus that is replication-defective. In order to produce virions, a packaging cell line containing the gag, pol, and env genes but without the LTR and packaging components is constructed (Mann et al., 1983). When a recombinant plasmid containing a cDNA, together with the retroviral LTR and packaging sequences is introduced into this cell line (by calcium phosphate precipitation for example), the packaging sequence allows the RNA transcript of the recombinant plasmid to be packaged into viral particles, which are then secreted into the culture media (Nicolas and Rubenstein, 1988; Temin, 1986; Mann et al., 1983). The media containing the recombinant retroviruses is then collected, optionally concentrated, and used for gene transfer. Retroviral vectors are able to infect a broad variety of cell types. However, integration and stable expression require the division of host cells (Paskind et al., 1975).

[0125] A novel approach designed to allow specific targeting of retrovirus vectors was recently developed based on the chemical modification of a retrovirus by the chemical addition of lactose residues to the viral envelope. This modification could permit the specific infection of hepatocytes via sialoglycoprotein receptors.

[0126] A different approach to targeting of recombinant retroviruses was designed in which biotinylated antibodies against a retroviral envelope protein and against a specific cell receptor were used. The antibodies were coupled via the biotin components by using streptavidin (Roux et al., 1989). Using antibodies against major histocompatibility complex class I and class II antigens, they demonstrated the infection of a variety of human cells that bore those surface antigens with an ecotropic virus in vitro (Roux et al., 1989).

[0127] There are certain limitations to the use of retrovirus vectors in all aspects of the present invention. For example, retrovirus vectors usually integrate into random sites in the cell genome. This can lead to insertional mutagenesis through the interruption of host genes or through the insertion of viral regulatory sequences that can interfere with the function of flanking genes (Varmus et al., 1981). Another concern with the use of defective retrovirus vectors is the potential appearance of wild-type replication-competent virus in the packaging cells. This can result from recombination events in which the intact sequence from the recombinant virus inserts upstream from the gag, pol, and env sequence integrated in the host cell genome. However, new packaging cell lines are now available that should greatly decrease the likelihood of recombination (Markowitz et al., 1988; Hersdorffer et al., 1990).

[0128] 3. Adeno-Associated Viruses

[0129] AAV (Ridgeway, 1988; Hermonat and Muzycska, 1984) is a parovirus, discovered as a contamination of adenoviral stocks. It is a ubiquitous virus (antibodies are present in 85% of the US human population) that has not been linked to any disease. It is also classified as a dependovirus, because its replications is dependent on the presence of a helper virus, such as adenovirus. Five serotypes have been isolated, of which AAV-2 is the best characterized. AAV has a single-stranded linear DNA that is encapsidated into capsid proteins VP1, VP2 and VP3 to form an icosahedral virion of 20 to 24 nm in diameter (Muzyczka and McLaughlin, 1988).

[0130] The AAV DNA is approximately 4.7 kilobases long. It contains two open reading frames and is flanked by two ITRs (FIG. 2). There are two major genes in the AAV genome: rep and cap. The rep gene codes for proteins responsible for viral replications, whereas cap codes for capsid protein VP1-3. Each ITR forms a T-shaped hairpin structure. These terminal repeats are the only essential cis components of the AAV for chromosomal integration. Therefore, the AAV can be used as a vector with all viral coding sequences removed and replaced by the cassette of genes for delivery. Three viral promoters have been identified and named p5, p19, and p40, according to their map position. Transcription from p5 and p19 results in production of rep proteins, and transcription from p40 produces the capsid proteins (Hermonat and Muzyczka, 1984).

[0131] There are several factors that prompted researchers to study the possibility of using rAAV as an expression vector One is that the requirements for delivering a gene to integrate into the host chromosome are surprisingly few. It is necessary to have the 145-bp ITRs, which are only 6% of the AAV genome. This leaves room in the vector to assemble a 4.5-kb DNA insertion. While this carrying capacity may prevent the AAV from delivering large genes, it is amply suited for delivering the antisense constructs of the present invention.

[0132] AAV is also a good choice of delivery vehicles due to its safety. There is a relatively complicated rescue mechanism: not only wild type adenovirus but also AAV genes are required to mobilize rAAV. Likewise, AAV is not pathogenic and not associated with any disease. The removal of viral coding sequences minimizes immune reactions to viral gene expression, and therefore, rAAV does not evoke an imflammatory response.

[0133] 4. Other Viral Vectors as Expression Constructs

[0134] Other viral vectors may be employed as expression constructs in the present invention for the delivery of oligonucleotide or polynucleotide sequences to a host cell. Vectors derived from viruses such as vaccinia virus (Ridgeway, 1988; Coupar et al., 1988), lentiviruses, polio viruses and herpesviruses may be employed. They offer several attractive features for various mammalian cells (Friedmann, 1989; Ridgeway, 1988; Coupar et al., 1988; Horwich et al., 1990).

[0135] With the recent recognition of defective hepatitis B viruses, new insight was gained into the structure-function relationship of different viral sequences. In vitro studies showed that the virus could retain the ability for helper-dependent packaging and reverse transcription despite the deletion of up to 80% of its genome (Horwich et al., 1990). This suggested that large portions of the genome could be replaced with foreign genetic material. The hepatotropism and persistence (integration) were particularly attractive properties for liver-directed gene transfer. Chang et al (1991) introduced the chloramphenicol acetyltransferase (CAT) gene into duck hepatitis B virus genome in the place of the polymerase, surface, and pre-surface coding sequences. It was cotransfected with wild-type virus into an avian hepatoma cell line. Culture media containing high titers of the recombinant virus were used to infect primary duckling hepatocytes. Stable CAT gene expression was detected for at least 24 days after transfection (Chang et al., 1991).

[0136] 5. Non-Viral Vectors

[0137] In order to effect expression of the oligonucleotide or polynucleotide sequences of the present invention, the expression construct must be delivered into a cell. This delivery may be accomplished in vitro, as in laboratory procedures for transforming cells lines, or in vivo or ex vivo, as in the treatment of certain disease states. As described above, one preferred mechanism for delivery is via viral infection where the expression construct is encapsidated in an infectious viral particle.

[0138] Once the expression construct has been delivered into the cell the nucleic acid encoding the desired oligonucleotide or polynucleotide sequences may be positioned and expressed at different sites. In certain embodiments, the nucleic acid encoding the construct may be stably integrated into the genome of the cell. This integration may be in the specific location and orientation via homologous recombination (gene replacement) or it may be integrated in a random, non-specific location (gene augmentation). In yet further embodiments, the nucleic acid may be stably maintained in the cell as a separate, episomal segment of DNA. Such nucleic acid segments or “episomes” encode sequences sufficient to permit maintenance and replication independent of or in synchronization with the host cell cycle. How the expression construct is delivered to a cell and where in the cell the nucleic acid remains is dependent on the type of expression construct employed.

[0139] In certain embodiments of the invention, the expression construct comprising one or more oligonucleotide or polynucleotide sequences may simply consist of naked recombinant DNA or plasmids. Transfer of the construct may be performed by any of the methods mentioned above which physically or chemically permeabilize the cell membrane. This is particularly applicable for transfer in vitro but it may be applied to in vivo use as well. Dubensky et al. (1984) successfully injected polyomavirus DNA in the form of calcium phosphate precipitates into liver and spleen of adult and newborn mice demonstrating active viral replication and acute infection. Benvenisty and Reshef (1986) also demonstrated that direct intraperitoneal injection of calcium phosphate-precipitated plasmids results in expression of the transfected genes. It is envisioned that DNA encoding a gene of interest may also be transferred in a similar manner in vivo and express the gene product.

[0140] Another embodiment of the invention for transferring a naked DNA expression construct into cells may involve particle bombardment. This method depends on the ability to accelerate DNA-coated microprojectiles to a high velocity allowing them to pierce cell membranes and enter cells without killing them (Klein et al., 1987). Several devices for accelerating small particles have been developed. One such device relies on a high voltage discharge to generate an electrical current, which in turn provides the motive force (Yang et al., 1990). The microprojectiles used have consisted of biologically inert substances such as tungsten or gold beads.

[0141] Selected organs including the liver, skin, and muscle tissue of rats and mice have been bombarded in vivo (Yang et al., 1990; Zelenin et al., 1991). This may require surgical exposure of the tissue or cells, to eliminate any intervening tissue between the gun and the target organ, i.e. ex vivo treatment. Again, DNA encoding a particular gene may be delivered via this method and still be incorporated by the present invention.

### Antisense Oligonucleotides

[0142] The end result of the flow of genetic information is the synthesis of protein. DNA is transcribed by polymerases into messenger RNA and translated on the ribosome to yield a folded, functional protein. Thus, even from this simplistic description of an extremely complex set of reactions, it is obvious that there are several steps along the route where protein synthesis can be inhibited. The native DNA segment coding for a polypeptide described herein, as all such mammalian DNA strands, has two strands: a sense strand and an antisense strand held together by hydrogen bonding. The messenger RNA coding for polypeptide has the same nucleotide sequence as the sense DNA strand except that the DNA thymidine is replaced by uridine. Thus, synthetic antisense nucleotide sequences will bind to a mRNA and inhibit expression of the protein encoded by that mRNA.

[0143] Thus, the targeting of antisense oligonucleotides to bind mRNA is one mechanism to shut down protein synthesis, and, consequently, represents a powerful and targeted therapeutic approach. For example, the synthesis of polygalactauronase and the muscarine type 2 acetylcholine receptor are inhibited by antisense oligonucleotides directed to their respective mRNA sequences (U.S. Pat. No. 5,739,119 and U.S. Pat. No. 5,759,829, each specifically incorporated herein by reference in its entirety). Further, examples of antisense inhibition have been demonstrated with the nuclear protein cyclin, the multiple drug resistance gene (MDG1), ICAM-1, E-selectin, STK-1, striatal GABAA receptor and human EGF (Jaskulski et al., 1988; Vasanthakumar and Ahmed, 1989; Peris et al., 1998; U.S. Pat. No. 5,801,154; U.S. Pat. No. 5,789,573; U.S. Pat. No. 5,718,709 and U.S. Pat. No. 5,610,288, each specifically incorporated herein by reference in its entirety). Antisense constructs have also been described that inhibit and can be used to treat a variety of abnormal cellular proliferations, e.g. cancer (U.S. Pat. No. 5,747,470; U.S. Pat. No. 5,591,317 and U.S. Pat. No. 5,783,683, each specifically incorporated herein by reference in its entirety).

[0144] Therefore, in exemplary embodiments, the invention provides oligonucleotide sequences that comprise all, or a portion of, any sequence that is capable of specifically binding to polynucleotide sequence described herein, or a complement thereof. In one embodiment, the antisense oligonucleotides comprise DNA or derivatives thereof. In another embodiment, the oligonucleotides comprise RNA or derivatives thereof. In a third embodiment, the oligonucleotides are modified DNAs comprising a phosphorothioated modified backbone. In a fourth embodiment, the oligonucleotide sequences comprise peptide nucleic acids or derivatives thereof. In each case, preferred compositions comprise a sequence region that is complementary, and more preferably substantially-complementary, and even more preferably, completely complementary to one or more portions of polynucleotides disclosed herein.

[0145] Selection of antisense compositions specific for a given gene sequence is based upon analysis of the chosen target sequence (i.e. in these illustrative examples the rat and human sequences) and determination of secondary structure, Tₘ, binding energy, relative stability, and antisense compositions were selected based upon their relative inability to form dimers, hairpins, or other secondary structures that would reduce or prohibit specific binding to the target mRNA in a host cell.

[0146] Highly preferred target regions of the mRNA, are those which are at or near the AUG translation initiation codon, and those sequences which were substantially complementary to 5′ regions of the mRNA. These secondary structure analyses and target site selection considerations were performed using v.4 of the OLIGO primer analysis software (Rychlik, 1997) and the BLASTN 2.0.5 algorithm software (Altschul et al., 1997).

[0147] The recent development of an antisense delivery method based on the use of a short peptide vector, termed MPG (27 residues), is also contemplated. The MPG peptide contains a hydrophobic domain derived from the fusion sequence of HIV gp41 and a hydrophilic domain from the nuclear localization sequence of SV40 T-antigen (Morris et al., 1997). It was demonstrated in that several molecules of the MPG peptides coat the antisense oligonucleotides and can be delivered into cultured mammalian cells in less than 1 hour with relatively high efficiency (90%). Further, the interaction with MPG strongly increases both the stability of the oligonucleotide to nuclease and the ability to cross the plasma membrane (Morris et al., 1997).

### Ribrozymes

[0148] The present invention also provides, within alternate embodiments, ribozyme inhibitors of a variety of ovarian tumors. A ribozyme is an RNA molecule that specifically cleaves RNA substrates, such as mRNA, resulting in specific inhibition or interference with cellular gene expression. As used herein, the term “ribozymes” includes RNA molecules that contain antisense sequences for specific recognition, and an RNA-cleaving endonuclease activity. (Kim and Cech, 1987; Gerlach et al., 1987; Forster and Symons, 1987). The catalytic strand cleaves a specific site in a target RNA at greater than stoichiometric concentration. For example, a large number of ribozymes accelerate phosphoester transfer reactions with a high degree of specificity, often cleaving only one of several phosphoesters in an oligonucleotide substrate (Cech et al., 1981; Michel and Westhof, 1990; Reinhold-Hurek and Shub, 1992). This specificity has been attributed to the requirement that the substrate bind via specific base-pairing interactions to the internal guide sequence (“IGS”) of the ribozyme prior to chemical reaction.

[0149] Ribozyme catalysis has primarily been observed as part of sequence-specific cleavage/ligation reactions involving nucleic acids (Joyce, 1989; Cech et al., 1981). For example, U.S. Pat. No. 5,354,855 (specifically incorporated herein by reference) reports that certain ribozymes can act as endonucleases with a sequence specificity greater than that of known ribonucleases and approaching that of the DNA restriction enzymes. Thus, sequence-specific ribozyme-mediated inhibition of gene expression may be particularly suited to therapeutic applications (Scanlon et al., 1991; Sarver et al., 1990). Recently, it was reported that ribozymes elicited genetic changes in some cells lines to which they were applied; the altered genes included the oncogenes H-ras, c-fos and genes of HIV. Most of this work involved the modification of a target mRNA, based on a specific mutant codon that is cleaved by a specific ribozyme.

[0150] Six basic varieties of naturally-occurring enzymatic RNAs are known presently. Each can catalyze the hydrolysis of RNA phosphodiester bonds in trans (and thus can cleave other RNA molecules) under physiological conditions. In general, enzymatic nucleic acids act by first binding to a target RNA. Such binding occurs through the target binding portion of a enzymatic nucleic acid which is held in close proximity to an enzymatic portion of the molecule that acts to cleave the target RNA. Thus, the enzymatic nucleic acid first recognizes and then binds a target RNA through complementary base-pairing, and once bound to the correct site, acts enzymatically to cut the target RNA. Strategic cleavage of such a target RNA will destroy its ability to direct synthesis of an encoded protein. After an enzymatic nucleic acid has bound and cleaved its RNA target, it is released from that RNA to search for another target and can repeatedly bind and cleave new targets.

[0151] The enzymatic nature of a ribozyme is advantageous over many technologies, such as antisense technology (where a nucleic acid molecule simply binds to a nucleic acid target to block its translation) since the concentration of ribozyme necessary to affect a therapeutic treatment is lower than that of an antisense oligonucleotide. This advantage reflects the ability of the ribozyme to act enzymatically. Thus, a single ribozyme molecule is able to cleave many molecules of target RNA. In addition, the ribozyme is a highly specific inhibitor, with the specificity of inhibition depending not only on the base pairing mechanism of binding to the target RNA, but also on the mechanism of target RNA cleavage. Single mismatches, or base-substitutions, near the site of cleavage can completely eliminate catalytic activity of a ribozyme. Similar mismatches in antisense molecules do not prevent their action (Woolf et al, 1992). Thus, the specificity of action of a ribozyme is greater than that of an antisense oligonucleotide binding the same RNA site.

[0152] The enzymatic nucleic acid molecule may be formed in a hammerhead, hairpin, a hepatitis δ virus, group I intron or RNaseP RNA (in association with an RNA guide sequence) or Neurospora VS RNA motif. Examples of hammerhead motifs are described by Rossi et al. (1992). Examples of hairpin motifs are described by Hampel et al. (Eur. Pat. Appl. Publ. No. EP 0360257), Hampel and Tritz (1989), Hampel et al. (1990) and U.S. Pat. No. 5,631,359 (specifically incorporated herein by reference). An example of the hepatitis δ virus motif is described by Perrotta and Been (1992); an example of the RNaseP motif is described by Guerrier-Takada et al. (1983); Neurospora VS RNA ribozyme motif is described by Collins (Saville and Collins, 1990; Saville and Collins, 1991; Collins and Olive, 1993); and an example of the Group I intron is described in (U.S. Pat. No. 4,987,071, specifically incorporated herein by reference). All that is important in an enzymatic nucleic acid molecule of this invention is that it has a specific substrate binding site which is complementary to one or more of the target gene RNA regions, and that it have nucleotide sequences within or surrounding that substrate binding site which impart an RNA cleaving activity to the molecule. Thus the ribozyme constructs need not be limited to specific motifs mentioned herein.

[0153] In certain embodiments, it may be important to produce enzymatic cleaving agents which exhibit a high degree of specificity for the RNA of a desired target, such as one of the sequences disclosed herein. The enzymatic nucleic acid molecule is preferably targeted to a highly conserved sequence region of a target mRNA. Such enzymatic nucleic acid molecules can be delivered exogenously to specific cells as required. Alternatively, the ribozymes can be expressed from DNA or RNA vectors that are delivered to specific cells.

[0154] Small enzymatic nucleic acid motifs (e.g., of the hammerhead or the hairpin structure) may also be used for exogenous delivery. The simple structure of these molecules increases the ability of the enzymatic nucleic acid to invade targeted regions of the mRNA structure. Alternatively, catalytic RNA molecules can be expressed within cells from eukaryotic promoters (e.g., Scanlon et al., 1991; Kashani-Sabet et al, 1992; Dropulic et al, 1992; Weerasinghe et al., 1991; Ojwang et al., 1992; Chen et al., 1992; Sarver et al., 1990). Those skilled in the art realize that any ribozyme can be expressed in eukaryotic cells from the appropriate DNA vector. The activity of such ribozymes can be augmented by their release from the primary transcript by a second ribozyme (Int. Pat. Appl. Publ. No. WO 93/23569, and Int. Pat. Appl. Publ. No. WO 94/02595, both hereby incorporated by reference; Ohkawa et al., 1992; Taira et al., 1991; and Ventura et al., 1993).

[0155] Ribozymes may be added directly, or can be complexed with cationic lipids, lipid complexes, packaged within liposomes, or otherwise delivered to target cells. The RNA or RNA complexes can be locally administered to relevant tissues ex vivo, or in vivo through injection, aerosol inhalation, infusion pump or stent, with or without their incorporation in biopolymers.

[0156] Ribozymes may be designed as described in Int. Pat. Appl. Publ. No. WO 93/23569 and Int. Pat. Appl. Publ. No. WO 94/02595, each specifically incorporated herein by reference) and synthesized to be tested in vitro and in vivo, as described. Such ribozymes can also be optimized for delivery. While specific examples are provided, those in the art will recognize that equivalent RNA targets in other species can be utilized when necessary.

[0157] Hammerhead or hairpin ribozymes may be individually analyzed by computer folding (Jaeger et al., 1989) to assess whether the ribozyme sequences fold into the appropriate secondary structure. Those ribozymes with unfavorable intramolecular interactions between the binding arms and the catalytic core are eliminated from consideration. Varying binding arm lengths can be chosen to optimize activity. Generally, at least 5 or so bases on each arm are able to bind to, or otherwise interact with, the target RNA.

[0158] Ribozymes of the hammerhead or hairpin motif may be designed to anneal to various sites in the mRNA message, and can be chemically synthesized. The method of synthesis used follows the procedure for normal RNA synthesis as described in Usman et al. (1987) and in Scaringe et al. (1990) and makes use of common nucleic acid protecting and coupling groups, such as dimethoxytrityl at the 5′-end, and phosphoramidites at the 3′-end. Average stepwise coupling yields are typically >98%. Hairpin ribozymes may be synthesized in two parts and annealed to reconstruct an active ribozyme (Chowrira and Burke, 1992). Ribozymes may be modified extensively to enhance stability by modification with nuclease resistant groups, for example, 2′-amino, 2′-C-allyl, 2′-flouro, 2′-o-methyl, 2′-H (for a review see e.g., Usman and Cedergren, 1992). Ribozymes may be purified by gel electrophoresis using general methods or by high pressure liquid chromatography and resuspended in water.

[0159] Ribozyme activity can be optimized by altering the length of the ribozyme binding arms, or chemically synthesizing ribozymes with modifications that prevent their degradation by serum ribonucleases (see e.g., Int. Pat. Appl. Publ. No. WO 92/07065; Perrault et al, 1990; Pieken et al., 1991; Usman and Cedergren, 1992; Int. Pat. Appl. Publ. No. WO 93/15187; Int. Pat. Appl. Publ. No. WO 91/03162; Eur. Pat. Appl. Publ. No. 92110298.4; U.S. Pat. No. 5,334,711; and Int. Pat. Appl. Publ. No. WO 94/13688, which describe various chemical modifications that can be made to the sugar moieties of enzymatic RNA molecules), modifications which enhance their efficacy in cells, and removal of stem II bases to shorten RNA synthesis times and reduce chemical requirements.

[0160] Sullivan et al (Int. Pat. Appl. Publ. No. WO 94/02595) describes the general methods for delivery of enzymatic RNA molecules. Ribozymes may be administered to cells by a variety of methods known to those familiar to the art, including, but not restricted to, encapsulation in liposomes, by iontophoresis, or by incorporation into other vehicles, such as hydrogels, cyclodextrins, biodegradable nanocapsules, and bioadhesive microspheres. For some indications, ribozymes may be directly delivered ex vivo to cells or tissues with or without the aforementioned vehicles. Alternatively, the RNA/vehicle combination may be locally delivered by direct inhalation, by direct injection or by use of a catheter, infusion pump or stent. Other routes of delivery include, but are not limited to, intravascular, intramuscular, subcutaneous or joint injection, aerosol inhalation, oral (tablet or pill form), topical, systemic, ocular, intraperitoneal and/or intrathecal delivery. More detailed descriptions of ribozyme delivery and administration are provided in Int. Pat. Appl. Publ. No. WO 94/02595 and Int. Pat. Appl. Publ. No. WO 93/23569, each specifically incorporated herein by reference.

[0161] Another means of accumulating high concentrations of a ribozyme(s) within cells is to incorporate the ribozyme-encoding sequences into a DNA expression vector. Transcription of the ribozyme sequences are driven from a promoter for eukaryotic RNA polymerase I (pol I), RNA polymerase II (pol II), or RNA polymerase III (pol III). Transcripts from pol II or pol III promoters will be expressed at high levels in all cells; the levels of a given pol II promoter in a given cell type will depend on the nature of the gene regulatory sequences (enhancers, silencers, etc.) present nearby. Prokaryotic RNA polymerase promoters may also be used, providing that the prokaryotic RNA polymerase enzyme is expressed in the appropriate cells (Elroy-Stein and Moss, 1990; Gao and Huang, 1993; Lieber et al., 1993; Zhou et al., 1990). Ribozymes expressed from such promoters can function in mammalian cells (e.g. Kashani-Saber et al., 1992; Ojwang et al., 1992; Chen et al., 1992; Yu et al., 1993; L'Huillier et al., 1992; Lisziewicz et al., 1993). Such transcription units can be incorporated into a variety of vectors for introduction into mammalian cells, including but not restricted to, plasmid DNA vectors, viral DNA vectors (such as adenovirus or adeno-associated vectors), or viral RNA vectors (such as retroviral, semliki forest virus, sindbis virus vectors).

[0162] Ribozymes of this invention may be used as diagnostic tools to examine genetic drift and mutations within diseased cells. They can also be used to assess levels of the target RNA molecule. The close relationship between ribozyme activity and the structure of the target RNA allows the detection of mutations in any region of the molecule which alters the base-pairing and three-dimensional structure of the target RNA. By using multiple ribozymes described in this invention, one may map nucleotide changes which are important to RNA structure and function in vitro, as well as in cells and tissues. Cleavage of target RNAs with ribozymes may be used to inhibit gene expression and define the role (essentially) of specified gene products in the progression of disease. In this manner, other genetic targets may be defined as important mediators of the disease. These studies will lead to better treatment of the disease progression by affording the possibility of combinational therapies (e.g., multiple ribozymes targeted to different genes, ribozymes coupled with known small molecule inhibitors, or intermittent treatment with combinations of ribozymes and/or other chemical or biological molecules). Other in vitro uses of ribozymes of this invention are well known in the art, and include detection of the presence of mRNA associated with an IL-5 related condition. Such RNA is detected by determining the presence of a cleavage product after treatment with a ribozyme using standard methodology.

### Peptide Nucleic Acids

[0163] In certain embodiments, the inventors contemplate the use of peptide nucleic acids (PNAs) in the practice of the methods of the invention. PNA is a DNA mimic in which the nucleobases are attached to a pseudopeptide backbone (Good and Nielsen, 1997). PNA is able to be utilized in a number methods that traditionally have used RNA or DNA. Often PNA sequences perform better in techniques than the corresponding RNA or DNA sequences and have utilities that are not inherent to RNA or DNA. An excellent review of PNA including methods of making, characteristics of, and methods of using, is provided by Corey (1997) and is incorporated herein by reference. As such, in certain embodiments, one may prepare PNA sequences that are complementary to one or more portions of the ACE mRNA sequence, and such PNA compositions may be used to regulate, alter, decrease, or reduce the translation of ACE-specific mRNA, and thereby alter the level of ACE activity in a host cell to which such PNA compositions have been administered.

[0164] PNAs have 2-aminoethyl-glycine linkages replacing the normal phosphodiester backbone of DNA (Nielsen et al, 1991; Hanvey et al., 1992; Hyrup and Nielsen, 1996; Neilsen, 1996). This chemistry has three important consequences: firstly, in contrast to DNA or phosphorothioate oligonucleotides, PNAs are neutral molecules; secondly, PNAs are achiral, which avoids the need to develop a stereoselective synthesis; and thirdly, PNA synthesis uses standard Boc (Dueholm et al., 1994) or Fmoc (Thomson et al., 1995) protocols for solid-phase peptide synthesis, although other methods, including a modified Merrifield method, have been used (Christensen et al., 1995).

[0165] PNA monomers or ready-made oligomers are commercially available from PerSeptive Biosystems (Framingham, Mass., USA). PNA syntheses by either Boc or Fmoc protocols are straightforward using manual or automated protocols (Norton et al., 1995). The manual protocol lends itself to the production of chemically modified PNAs or the simultaneous synthesis of families of closely related PNAs.

[0166] As with peptide synthesis, the success of a particular PNA synthesis will depend on the properties of the chosen sequence. For example, while in theory PNAs can incorporate any combination of nucleotide bases, the presence of adjacent purines can lead to deletions of one or more residues in the product. In expectation of this difficulty, it is suggested that, in producing PNAs with adjacent purines, one should repeat the coupling of residues likely to be added inefficiently. This should be followed by the purification of PNAs by reverse-phase high-pressure liquid chromatography (Norton et al., 1995) providing yields and purity of product similar to those observed during the synthesis of peptides.

[0167] Modifications of PNAs for a given application may be accomplished by coupling amino acids during solid-phase synthesis or by attaching compounds that contain a carboxylic acid group to the exposed N-terminal amine. Alternatively, PNAs can be modified after synthesis by coupling to an introduced lysine or cysteine. The ease with which PNAs can be modified facilitates optimization for better solubility or for specific functional requirements. Once synthesized, the identity of PNAs and their derivatives can be confirmed by mass spectrometry. Several studies have made and utilized modifications of PNAs (Norton et al., 1995; Haaima et al., 1996; Stetsenko et al., 1996; Petersen et al., 1995; Ulmann et al, 1996; Koch et al., 1995; Orum et al., 1995; Footer et al., 1996; Griffith et al., 1995; Kremsky et al., 1996; Pardridge et al., 1995; Boffa et al., 1995; Landsdorp et al., 1996; Gambacorti-Passerini et al., 1996; Armitage et al., 1997; Seeger et al., 1997; Ruskowski et al., 1997). U.S. Pat. No. 5,700,922 discusses PNA-DNA-PNA chimeric molecules and their uses in diagnostics, modulating protein in organisms, and treatment of conditions susceptible to therapeutics.

[0168] In contrast to DNA and RNA, which contain negatively charged linkages, the PNA backbone is neutral. In spite of this dramatic alteration, PNAs recognize complementary DNA and RNA by Watson-Crick pairing (Egholm et al., 1993), validating the initial modeling by Nielsen et al. (1991). PNAs lack 3′ to 5′ polarity and can bind in either parallel or antiparallel fashion, with the antiparallel mode being preferred (Egholm et al, 1993).

[0169] Hybridization of DNA oligonucleotides to DNA and RNA is destabilized by electrostatic repulsion between the negatively charged phosphate backbones of the complementary strands. By contrast, the absence of charge repulsion in PNA-DNA or PNA-RNA duplexes increases the melting temperature (Tₘ) and reduces the dependence of Tₘ on the concentration of mono- or divalent cations (Nielsen et al., 1991). The enhanced rate and affinity of hybridization are significant because they are responsible for the surprising ability of PNAs to perform strand invasion of complementary sequences within relaxed double-stranded DNA. In addition, the efficient hybridization at inverted repeats suggests that PNAs can recognize secondary structure effectively within double-stranded DNA. Enhanced recognition also occurs with PNAs immobilized on surfaces, and Wang et al. have shown that support-bound PNAs can be used to detect hybridization events (Wang et al., 1996).

[0170] One might expect that tight binding of PNAs to complementary sequences would also increase binding to similar (but not identical) sequences, reducing the sequence specificity of PNA recognition. As with DNA hybridization, however, selective recognition can be achieved by balancing oligomer length and incubation temperature. Moreover, selective hybridization of PNAs is encouraged by PNA-DNA hybridization being less tolerant of base mismatches than DNA-DNA hybridization. For example, a single mismatch within a 16 bp PNA-DNA duplex can reduce the Tₘ by up to 15° C. (Egholm et al., 1993). This high level of discrimination has allowed the development of several PNA-based strategies for the analysis of point mutations (Wang et al., 1996; Carlsson et al., 1996; Thiede et al., 1996; Webb and Hurskainen, 1996; Perry-O'Keefe et al., 1996).

[0171] High-affinity binding provides clear advantages for molecular recognition and the development of new applications for PNAs. For example, 11-13 nucleotide PNAs inhibit the activity of telomerase, a ribonucleo-protein that extends telomere ends using an essential RNA template, while the analogous DNA oligomers do not (Norton et al., 1996).

[0172] Neutral PNAs are more hydrophobic than analogous DNA oligomers, and this can lead to difficulty solubilizing them at neutral pH, especially if the PNAs have a high purine content or if they have the potential to form secondary structures. Their solubility can be enhanced by attaching one or more positive charges to the PNA termini (Nielsen et al., 1991).

[0173] Findings by Allfrey and colleagues suggest that strand invasion will occur spontaneously at sequences within chromosomal DNA (Boffa et al., 1995; Boffa et al., 1996). These studies targeted PNAs to triplet repeats of the nucleotides CAG and used this recognition to purify transcriptionally active DNA (Boffa et al., 1995) and to inhibit transcription (Boffa et al., 1996). This result suggests that if PNAs can be delivered within cells then they will have the potential to be general sequence-specific regulators of gene expression. Studies and reviews concerning the use of PNAs as antisense and anti-gene agents include Nielsen et al. (1993b), Hanvey et al. (1992), and Good and Nielsen (1997). Koppelhus et al. (1997) have used PNAs to inhibit HIV-1 inverse transcription, showing that PNAs may be used for antiviral therapies.

[0174] Methods of characterizing the antisense binding properties of PNAs are discussed in Rose (1993) and Jensen et al. (1997). Rose uses capillary gel electrophoresis to determine binding of PNAs to their complementary oligonucleotide, measuring the relative binding kinetics and stoichiometry. Similar types of measurements were made by Jensen et al. using BIAcore™ technology.

[0175] Other applications of PNAs include use in DNA strand invasion (Nielsen et al., 1991), antisense inhibition (Hanvey et al., 1992), mutational analysis (Orum et al., 1993), enhancers of transcription (Mollegaard et al, 1994), nucleic acid purification (Orum et al., 1995), isolation of transcriptionally active genes (Boffa et al., 1995), blocking of transcription factor binding (Vickers et al, 1995), genome cleavage (Veselkov et al., 1996), biosensors (Wang et al., 1996), in situ hybridization (Thisted et al., 1996), and in a alternative to Southern blotting (Perry-O'Keefe, 1996).

### Polypeptide Compositions

[0176] The present invention, in other aspects, provides polypeptide compositions. Generally, a polypeptide of the invention will be an isolated polypeptide (or an epitope, variant, or active fragment thereof) derived from a mammalian species. Preferably, the polypeptide is encoded by a polynucleotide sequence disclosed herein or a sequence which hybridizes under moderately stringent conditions to a polynucleotide sequence disclosed herein.

[0177] In the present invention, a polypeptide composition is also understood to comprise one or more polypeptides that are immunologically reactive with antibodies generated against an polypeptide of the invention, particularly a polypeptide encoded by the nucleic acid sequence disclosed in SEQ ID NOs: 1-1737, or to active fragments, or to variants or biological functional equivalents thereof.

[0178] Likewise, a polypeptide composition of the present invention is understood to comprise one or more polypeptides that are capable of eliciting antibodies that are immunologically reactive with one or more polypeptides encoded by one or more contiguous nucleic acid sequences contained in SEQ ID NOs:1-1737, or to active fragments, or to strain variants thereof, or to one or more nucleic acid sequences which hybridize to one or more of these sequences under conditions of moderate to high stringency.

[0179] As used herein, an active fragment of a polypeptide includes a whole or a portion of a polypeptide which is modified by conventional techniques, e.g., mutagenesis, or by addition, deletion, or substitution, but which active fragment exhibits substantially the same structure function, antigenicity, etc., as a native polypeptide as described herein.

[0180] In certain illustrative embodiments, the polypeptides of the invention will comprise at least an immunogenic portion of an ovarian tumor protein or a variant thereof, as described herein. As noted above, an “ovarian tumor protein” is a protein that is expressed by ovarian tumor cells. Proteins that are ovarian tumor proteins also react detectably within an immunoassay (such as an ELISA) with antisera from a patient with ovarian cancer. Polypeptides as described herein may be of any length. Additional sequences derived from the native protein and/or heterologous sequences may be present, and such sequences may (but need not) possess further immunogenic or antigenic properties.

[0181] An “immunogenic portion,” as used herein is a portion of a protein that is recognized (i.e., specifically bound) by a B-cell and/or T-cell surface antigen receptor. Such immunogenic portions generally comprise at least 5 amino acid residues, more preferably at least 10, and still more preferably at least 20 amino acid residues of an ovarian tumor protein or a variant thereof. Certain preferred immunogenic portions include peptides in which an N-terminal leader sequence and/or transmembrane domain have been deleted. Other preferred immunogenic portions may contain a small N- and/or C-terminal deletion (e.g., 1-30 amino acids, preferably 5-15 amino acids), relative to the mature protein.

[0182] Immunogenic portions may generally be identified using well known techniques, such as those summarized in Paul, Fundamental Immunology, 3rd ed., 243-247 (Raven Press, 1993) and references cited therein. Such techniques include screening polypeptides for the ability to react with antigen-specific antibodies, antisera and/or T-cell lines or clones. As used herein, antisera and antibodies are “antigen-specific” if they specifically bind to an antigen (i.e., they react with the protein in an ELISA or other immunoassay, and do not react detectably with unrelated proteins). Such antisera and antibodies may be prepared as described herein, and using well known techniques. An immunogenic portion of a native ovarian tumor protein is a portion that reacts with such antisera and/or T-cells at a level that is not substantially less than the reactivity of the full length polypeptide (e.g., in an ELISA and/or T-cell reactivity assay). Such immunogenic portions may react within such assays at a level that is similar to or greater than the reactivity of the full length polypeptide. Such screens may generally be performed using methods well known to those of ordinary skill in the art, such as those described in Harlow and Lane, Antibodies: A Laboratory Manual, Cold Spring Harbor Laboratory, 1988. For example, a polypeptide may be immobilized on a solid support and contacted with patient sera to allow binding of antibodies within the sera to the immobilized polypeptide. Unbound sera may then be removed and bound antibodies detected using, for example, ¹²⁵I-labeled Protein A.

[0183] As noted above, a composition may comprise a variant of a native ovarian tumor protein. A polypeptide “variant,” as used herein, is a polypeptide that differs from a native ovarian tumor protein in one or more substitutions, deletions, additions and/or insertions, such that the immunogenicity of the polypeptide is not substantially diminished. In other words, the ability of a variant to react with antigen-specific antisera may be enhanced or unchanged, relative to the native protein, or may be diminished by less than 50%, and preferably less than 20%, relative to the native protein. Such variants may generally be identified by modifying one of the above polypeptide sequences and evaluating the reactivity of the modified polypeptide with antigen-specific antibodies or antisera as described herein. Preferred variants include those in which one or more portions, such as an N-terminal leader sequence or transmembrane domain, have been removed. Other preferred variants include variants in which a small portion (e.g., 1-30 amino acids, preferably 5-15 amino acids) has been removed from the N- and/or C-terminal of the mature protein.

[0184] Polypeptide variants encompassed by the present invention include those exhibiting at least about 70%, 75%, 80%, 85%, 90%, 91%, 92%, 93%, 94%, 95%, 96%, 97%, 98%, or 99% or more identity (determined as described above) to the polypeptides disclosed herein.

[0185] Preferably, a variant contains conservative substitutions. A “conservative substitution” is one in which an amino acid is substituted for another amino acid that has similar properties, such that one skilled in the art of peptide chemistry would expect the secondary structure and hydropathic nature of the polypeptide to be substantially unchanged. Amino acid substitutions may generally be made on the basis of similarity in polarity, charge, solubility, hydrophobicity, hydrophilicity and/or the amphipathic nature of the residues. For example, negatively charged amino acids include aspartic acid and glutamic acid; positively charged amino acids include lysine and arginine; and amino acids with uncharged polar head groups having similar hydrophilicity values include leucine, isoleucine and valine; glycine and alanine; asparagine and glutamine; and serine, threonine, phenylalanine and tyrosine. Other groups of amino acids that may represent conservative changes include: (1) ala, pro, gly, glu, asp, gln, asn, ser, thr; (2) cys, ser, tyr, thr; (3) val, ile, leu, met, ala, phe; (4) lys, arg, his; and (5) phe, tyr, trp, his. A variant may also, or alternatively, contain nonconservative changes. In a preferred embodiment, variant polypeptides differ from a native sequence by substitution, deletion or addition of five amino acids or fewer. Variants may also (or alternatively) be modified by, for example, the deletion or addition of amino acids that have minimal influence on the immunogenicity, secondary structure and hydropathic nature of the polypeptide.

[0186] As noted above, polypeptides may comprise a signal (or leader) sequence at the N-terminal end of the protein, which co-translationally or post-translationally directs transfer of the protein. The polypeptide may also be conjugated to a linker or other sequence for ease of synthesis, purification or identification of the polypeptide (e.g., poly-His), or to enhance binding of the polypeptide to a solid support. For example, a polypeptide may be conjugated to an immunoglobulin Fc region.

[0187] Polypeptides may be prepared using any of a variety of well known techniques. Recombinant polypeptides encoded by DNA sequences as described above may be readily prepared from the DNA sequences using any of a variety of expression vectors known to those of ordinary skill in the art. Expression may be achieved in any appropriate host cell that has been transformed or transfected with an expression vector containing a DNA molecule that encodes a recombinant polypeptide. Suitable host cells include prokaryotes, yeast, and higher eukaryotic cells, such as mammalian cells and plant cells. Preferably, the host cells employed are E. coli, yeast or a mammalian cell line such as COS or CHO. Supernatants from suitable host/vector systems which secrete recombinant protein or polypeptide into culture media may be first concentrated using a commercially available filter. Following concentration, the concentrate may be applied to a suitable purification matrix such as an affinity matrix or an ion exchange resin. Finally, one or more reverse phase HPLC steps can be employed to further purify a recombinant polypeptide.

[0188] Portions and other variants having less than about 100 amino acids, and generally less than about 50 amino acids, may also be generated by synthetic means, using techniques well known to those of ordinary skill in the art. For example, such polypeptides may be synthesized using any of the commercially available solid-phase techniques, such as the Merrifield solid-phase synthesis method, where amino acids are sequentially added to a growing amino acid chain. See Merrifield, J. Am. Chem. Soc. 85:2149-2146, 1963. Equipment for automated synthesis of polypeptides is commercially available from suppliers such as Perkin Elmer/Applied BioSystems Division (Foster City, Calif.), and may be operated according to the manufacturer's instructions.

[0189] Within certain specific embodiments, a polypeptide may be a fusion protein that comprises multiple polypeptides as described herein, or that comprises at least one polypeptide as described herein and an unrelated sequence, such as a known tumor protein. A fusion partner may, for example, assist in providing T helper epitopes (an immunological fusion partner), preferably T helper epitopes recognized by humans, or may assist in expressing the protein (an expression enhancer) at higher yields than the native recombinant protein. Certain preferred fusion partners are both immunological and expression enhancing fusion partners. Other fusion partners may be selected so as to increase the solubility of the protein or to enable the protein to be targeted to desired intracellular compartments. Still further fusion partners include affinity tags, which facilitate purification of the protein.

[0190] Fusion proteins may generally be prepared using standard techniques, including chemical conjugation. Preferably, a fusion protein is expressed as a recombinant protein, allowing the production of increased levels, relative to a non-fused protein, in an expression system. Briefly, DNA sequences encoding the polypeptide components may be assembled separately, and ligated into an appropriate expression vector. The 3′ end of the DNA sequence encoding one polypeptide component is ligated, with or without a peptide linker, to the 5′ end of a DNA sequence encoding the second polypeptide component so that the reading frames of the sequences are in phase. This permits translation into a single fusion protein that retains the biological activity of both component polypeptides.

[0191] A peptide linker sequence may be employed to separate the first and second polypeptide components by a distance sufficient to ensure that each polypeptide folds into its secondary and tertiary structures. Such a peptide linker sequence is incorporated into the fusion protein using standard techniques well known in the art. Suitable peptide linker sequences may be chosen based on the following factors: (1) their ability to adopt a flexible extended conformation; (2) their inability to adopt a secondary structure that could interact with functional epitopes on the first and second polypeptides; and (3) the lack of hydrophobic or charged residues that might react with the polypeptide functional epitopes. Preferred peptide linker sequences contain Gly, Asn and Ser residues. Other near neutral amino acids, such as Thr and Ala may also be used in the linker sequence. Amino acid sequences which may be usefully employed as linkers include those disclosed in Maratea et al., Gene 40:39-46, 1985; Murphy et al., Proc. Natl. Acad. Sci. USA 83:8258-8262, 1986; U.S. Pat. No. 4,935,233 and U.S. Pat. No. 4,751,180. The linker sequence may generally be from 1 to about 50 amino acids in length. Linker sequences are not required when the first and second polypeptides have non-essential N-terminal amino acid regions that can be used to separate the functional domains and prevent steric interference.

[0192] The ligated DNA sequences are operably linked to suitable transcriptional or translational regulatory elements. The regulatory elements responsible for expression of DNA are located only 5′ to the DNA sequence encoding the first polypeptides. Similarly, stop codons required to end translation and transcription termination signals are only present 3′ to the DNA sequence encoding the second polypeptide.

[0193] Fusion proteins are also provided. Such proteins comprise a polypeptide as described herein together with an unrelated immunogenic protein. Preferably the immunogenic protein is capable of eliciting a recall response. Examples of such proteins include tetanus, tuberculosis and hepatitis proteins (see, for example, Stoute et al. New Engl. J. Med., 336:86-91, 1997).

[0194] Within preferred embodiments, an immunological fusion partner is derived from protein D, a surface protein of the gram-negative bacterium Haemophilus influenza B (WO 91/18926). Preferably, a protein D derivative comprises approximately the first third of the protein (e.g., the first N-terminal 100-110 amino acids), and a protein D derivative may be lipidated. Within certain preferred embodiments, the first 109 residues of a Lipoprotein D fusion partner is included on the N-terminus to provide the polypeptide with additional exogenous T-cell epitopes and to increase the expression level in E. coli (thus functioning as an expression enhancer). The lipid tail ensures optimal presentation of the antigen to antigen presenting cells. Other fusion partners include the non-structural protein from influenzae virus, NS1 (hemaglutinin). Typically, the N-terminal 81 amino acids are used, although different fragments that include T-helper epitopes may be used.

[0195] In another embodiment, the immunological fusion partner is the protein known as LYTA, or a portion thereof (preferably a C-terminal portion). LYTA is derived from Streptococcus pneumoniae, which synthesizes an N-acetyl-L-alanine amidase known as amidase LYTA (encoded by the LytA gene; Gene 43:265-292, 1986). LYTA is an autolysin that specifically degrades certain bonds in the peptidoglycan backbone. The C-terminal domain of the LYTA protein is responsible for the affinity to the choline or to some choline analogues such as DEAE. This property has been exploited for the development of E. coli C-LYTA expressing plasmids useful for expression of fusion proteins. Purification of hybrid proteins containing the C-LYTA fragment at the amino terminus has been described (see Biotechnology 10:795-798, 1992). Within a preferred embodiment, a repeat portion of LYTA may be incorporated into a fusion protein. A repeat portion is found in the C-terminal region starting at residue 178. A particularly preferred repeat portion incorporates residues 188-305.

[0196] In general, polypeptides (including fusion proteins) and polynucleotides as described herein are isolated. An “isolated” polypeptide or polynucleotide is one that is removed from its original environment. For example, a naturally-occurring protein is isolated if it is separated from some or all of the coexisting materials in the natural system. Preferably, such polypeptides are at least about 90% pure, more preferably at least about 95% pure and most preferably at least about 99% pure. A polynucleotide is considered to be isolated if, for example, it is cloned into a vector that is not a part of the natural environment.

### Binding Agents

[0197] The present invention further provides agents, such as antibodies and antigen-binding fragments thereof, that specifically bind to an ovarian tumor protein. As used herein, an antibody, or antigen-binding fragment thereof, is said to “specifically bind” to an ovarian tumor protein if it reacts at a detectable level (within, for example, an ELISA) with an ovarian tumor protein, and does not react detectably with unrelated proteins under similar conditions. As used herein, “binding” refers to a noncovalent association between two separate molecules such that a complex is formed. The ability to bind may be evaluated by, for example, determining a binding constant for the formation of the complex. The binding constant is the value obtained when the concentration of the complex is divided by the product of the component concentrations. In general, two compounds are said to “bind,” in the context of the present invention, when the binding constant for complex formation exceeds about 103 L/mol. The binding constant may be determined using methods well known in the art.

[0198] Binding agents may be further capable of differentiating between patients with and without a cancer, such as ovarian cancer, using the representative assays provided herein. In other words, antibodies or other binding agents that bind to an ovarian tumor protein will generate a signal indicating the presence of a cancer in at least about 20% of patients with the disease, and will generate a negative signal indicating the absence of the disease in at least about 90% of individuals without the cancer. To determine whether a binding agent satisfies this requirement, biological samples (e.g., blood, sera, sputum, urine and/or tumor biopsies) from patients with and without a cancer (as determined using standard clinical tests) may be assayed as described herein for the presence of polypeptides that bind to the binding agent. It will be apparent that a statistically significant number of samples with and without the disease should be assayed. Each binding agent should satisfy the above criteria; however, those of ordinary skill in the art will recognize that binding agents may be used in combination to improve sensitivity.

[0199] Any agent that satisfies the above requirements may be a binding agent. For example, a binding agent may be a ribosome, with or without a peptide component, an RNA molecule or a polypeptide. In a preferred embodiment, a binding agent is an antibody or an antigen-binding fragment thereof. Antibodies may be prepared by any of a variety of techniques known to those of ordinary skill in the art. See, e.g., Harlow and Lane, Antibodies: A Laboratory Manual, Cold Spring Harbor Laboratory, 1988. In general, antibodies can be produced by cell culture techniques, including the generation of monoclonal antibodies as described herein, or via transfection of antibody genes into suitable bacterial or mammalian cell hosts, in order to allow for the production of recombinant antibodies. In one technique, an immunogen comprising the polypeptide is initially injected into any of a wide variety of mammals (e.g., mice, rats, rabbits, sheep or goats). In this step, the polypeptides of this invention may serve as the immunogen without modification. Alternatively, particularly for relatively short polypeptides, a superior immune response may be elicited if the polypeptide is joined to a carrier protein, such as bovine serum albumin or keyhole limpet hemocyanin. The immunogen is injected into the animal host, preferably according to a predetermined schedule incorporating one or more booster immunizations, and the animals are bled periodically. Polyclonal antibodies specific for the polypeptide may then be purified from such antisera by, for example, affinity chromatography using the polypeptide coupled to a suitable solid support.

[0200] Monoclonal antibodies specific for an antigenic polypeptide of interest may be prepared, for example, using the technique of Kohler and Milstein, Eur. J. Immunol. 6:511-519, 1976, and improvements thereto. Briefly, these methods involve the preparation of immortal cell lines capable of producing antibodies having the desired specificity (i.e., reactivity with the polypeptide of interest). Such cell lines may be produced, for example, from spleen cells obtained from an animal immunized as described above. The spleen cells are then immortalized by, for example, fusion with a myeloma cell fusion partner, preferably one that is syngeneic with the immunized animal. A variety of fusion techniques may be employed. For example, the spleen cells and myeloma cells may be combined with a nonionic detergent for a few minutes and then plated at low density on a selective medium that supports the growth of hybrid cells, but not myeloma cells. A preferred selection technique uses HAT (hypoxanthine, aminopterin, thymidine) selection. After a sufficient time, usually about 1 to 2 weeks, colonies of hybrids are observed. Single colonies are selected and their culture supernatants tested for binding activity against the polypeptide. Hybridomas having high reactivity and specificity are preferred.

[0201] Monoclonal antibodies may be isolated from the supernatants of growing hybridoma colonies. In addition, various techniques may be employed to enhance the yield, such as injection of the hybridoma cell line into the peritoneal cavity of a suitable vertebrate host, such as a mouse. Monoclonal antibodies may then be harvested from the ascites fluid or the blood. Contaminants may be removed from the antibodies by conventional techniques, such as chromatography, gel filtration, precipitation, and extraction. The polypeptides of this invention may be used in the purification process in, for example, an affinity chromatography step.

[0202] Within certain embodiments, the use of antigen-binding fragments of antibodies may be preferred. Such fragments include Fab fragments, which may be prepared using standard techniques. Briefly, immunoglobulins may be purified from rabbit serum by affinity chromatography on Protein A bead columns (Harlow and Lane, Antibodies: A Laboratory Manual, Cold Spring Harbor Laboratory, 1988) and digested by papain to yield Fab and Fc fragments. The Fab and Fc fragments may be separated by affinity chromatography on protein A bead columns.

[0203] Monoclonal antibodies of the present invention may be coupled to one or more therapeutic agents. Suitable agents in this regard include radionuclides, differentiation inducers, drugs, toxins, and derivatives thereof. Preferred radionuclides include ⁹⁰Y, ¹²³I, ¹²⁵I, ¹³¹I, ¹⁸⁶Re, ¹⁸⁸Re, ²¹¹At, and ²¹²Bi. Preferred drugs include methotrexate, and pyrimidine and purine analogs. Preferred differentiation inducers include phorbol esters and butyric acid. Preferred toxins include ricin, abrin, diptheria toxin, cholera toxin, gelonin, Pseudomonas exotoxin, Shigella toxin, and pokeweed antiviral protein.

[0204] A therapeutic agent may be coupled (e.g., covalently bonded) to a suitable monoclonal antibody either directly or indirectly (e.g., via a linker group). A direct reaction between an agent and an antibody is possible when each possesses a substituent capable of reacting with the other. For example, a nucleophilic group, such as an amino or sulfhydryl group, on one may be capable of reacting with a carbonyl-containing group, such as an anhydride or an acid halide, or with an alkyl group containing a good leaving group (e.g., a halide) on the other.

[0205] Alternatively, it may be desirable to couple a therapeutic agent and an antibody via a linker group. A linker group can function as a spacer to distance an antibody from an agent in order to avoid interference with binding capabilities. A linker group can also serve to increase the chemical reactivity of a substituent on an agent or an antibody, and thus increase the coupling efficiency. An increase in chemical reactivity may also facilitate the use of agents, or functional groups on agents, which otherwise would not be possible.

[0206] It will be evident to those skilled in the art that a variety of bifunctional or polyfunctional reagents, both homo- and hetero-functional (such as those described in the catalog of the Pierce Chemical Co., Rockford, Ill.), may be employed as the linker group. Coupling may be effected, for example, through amino groups, carboxyl groups, sulfhydryl groups or oxidized carbohydrate residues. There are numerous references describing such methodology, e.g., U.S. Pat. No. 4,671,958, to Rodwell et al.

[0207] Where a therapeutic agent is more potent when free from the antibody portion of the immunoconjugates of the present invention, it may be desirable to use a linker group which is cleavable during or upon internalization into a cell. A number of different cleavable linker groups have been described. The mechanisms for the intracellular release of an agent from these linker groups include cleavage by reduction of a disulfide bond (e.g., U.S. Pat. No. 4,489,710, to Spitler), by irradiation of a photolabile bond (e.g., U.S. Pat. No. 4,625,014, to Senter et al.), by hydrolysis of derivatized amino acid side chains (e.g., U.S. Pat. No. 4,638,045, to Kohn et al.), by serum complement-mediated hydrolysis (e.g., U.S. Pat. No. 4,671,958, to Rodwell et al.), and acid-catalyzed hydrolysis (e.g., U.S. Pat. No. 4,569,789, to Blattler et al.).

[0208] It may be desirable to couple more than one agent to an antibody. In one embodiment, multiple molecules of an agent are coupled to one antibody molecule. In another embodiment, more than one type of agent may be coupled to one antibody. Regardless of the particular embodiment, immunoconjugates with more than one agent may be prepared in a variety of ways. For example, more than one agent may be coupled directly to an antibody molecule, or linkers that provide multiple sites for attachment can be used. Alternatively, a carrier can be used.

[0209] A carrier may bear the agents in a variety of ways, including covalent bonding either directly or via a linker group. Suitable carriers include proteins such as albumins (e.g., U.S. Pat. No. 4,507,234, to Kato et al.), peptides and polysaccharides such as aminodextran (e.g., U.S. Pat. No. 4,699,784, to Shih et al.). A carrier may also bear an agent by noncovalent bonding or by encapsulation, such as within a liposome vesicle (e.g., U.S. Pat. Nos. 4,429,008 and 4,873,088). Carriers specific for radionuclide agents include radiohalogenated small molecules and chelating compounds. For example, U.S. Pat. No. 4,735,792 discloses representative radiohalogenated small molecules and their synthesis. A radionuclide chelate may be formed from chelating compounds that include those containing nitrogen and sulfur atoms as the donor atoms for binding the metal, or metal oxide, radionuclide. For example, U.S. Pat. No. 4,673,562, to Davison et al. discloses representative chelating compounds and their synthesis.

[0210] A variety of routes of administration for the antibodies and immunoconjugates may be used. Typically, administration will be intravenous, intramuscular, subcutaneous or in the bed of a resected tumor. It will be evident that the precise dose of the antibody/immunoconjugate will vary depending upon the antibody used, the antigen density on the tumor, and the rate of clearance of the antibody.

### T Cells

[0211] Immunotherapeutic compositions may also, or alternatively, comprise T cells specific for an ovarian tumor protein. Such cells may generally be prepared in vitro or ex vivo, using standard procedures. For example, T cells may be isolated from bone marrow, peripheral blood, or a fraction of bone marrow or peripheral blood of a patient, using a commercially available cell separation system, such as the Isolex™ System, available from Nexell Therapeutics, Inc. (Irvine, Calif.; see also U.S. Pat. No. 5,240,856; U.S. Pat. No. 5,215,926; WO 89/06280; WO 91/16116 and WO 92/07243). Alternatively, T cells may be derived from related or unrelated humans, non-human mammals, cell lines or cultures.

[0212] T cells may be stimulated with an ovarian tumor polypeptide, polynucleotide encoding an ovarian tumor polypeptide and/or an antigen presenting cell (APC) that expresses such a polypeptide. Such stimulation is performed under conditions and for a time sufficient to permit the generation of T cells that are specific for the polypeptide. Preferably, an ovarian tumor polypeptide or polynucleotide is present within a delivery vehicle, such as a microsphere, to facilitate the generation of specific T cells.

[0213] T cells are considered to be specific for an ovarian tumor polypeptide if the T cells specifically proliferate, secrete cytokines or kill target cells coated with the polypeptide or expressing a gene encoding the polypeptide. T cell specificity may be evaluated using any of a variety of standard techniques. For example, within a chromium release assay or proliferation assay, a stimulation index of more than two fold increase in lysis and/or proliferation, compared to negative controls, indicates T cell specificity. Such assays may be performed, for example, as described in Chen et al., Cancer Res. 54:1065-1070, 1994. Alternatively, detection of the proliferation of T cells may be accomplished by a variety of known techniques. For example, T cell proliferation can be detected by measuring an increased rate of DNA synthesis (e.g., by pulse-labeling cultures of T cells with tritiated thymidine and measuring the amount of tritiated thymidine incorporated into DNA). Contact with an ovarian tumor polypeptide (100 ng/ml-100 μg/ml, preferably 200 ng/ml-25 μg/ml) for 3-7 days should result in at least a two fold increase in proliferation of the T cells. Contact as described above for 2-3 hours should result in activation of the T cells, as measured using standard cytokine assays in which a two fold increase in the level of cytokine release (e.g., TNF or IFN-γ) is indicative of T cell activation (see Coligan et al., Current Protocols in Immunology, vol. 1, Wiley Interscience (Greene 1998)). T cells that have been activated in response to an ovarian tumor polypeptide, polynucleotide or polypeptide-expressing APC may be CD4⁺ and/or CD8⁺. Ovarian tumor protein-specific T cells may be expanded using standard techniques. Within preferred embodiments, the T cells are derived from a patient, a related donor or an unrelated donor, and are administered to the patient following stimulation and expansion.

[0214] For therapeutic purposes, CD4⁺ or CD8⁺ T cells that proliferate in response to an ovarian tumor polypeptide, polynucleotide or APC can be expanded in number either in vitro or in vivo. Proliferation of such T cells in vitro may be accomplished in a variety of ways. For example, the T cells can be re-exposed to an ovarian tumor polypeptide, or a short peptide corresponding to an immunogenic portion of such a polypeptide, with or without the addition of T cell growth factors, such as interleukin-2, and/or stimulator cells that synthesize an ovarian tumor polypeptide. Alternatively, one or more T cells that proliferate in the presence of an ovarian tumor protein can be expanded in number by cloning. Methods for cloning cells are well known in the art, and include limiting dilution.

### Pharmaceutical Compositions

[0215] In additional embodiments, the present invention concerns formulation of one or more of the polynucleotide, polypeptide, T-cell and/or antibody compositions disclosed herein in pharmaceutically-acceptable solutions for administration to a cell or an animal, either alone, or in combination with one or more other modalities of therapy.

[0216] It will also be understood that, if desired, the nucleic acid segment, RNA, DNA or PNA compositions that express a polypeptide as disclosed herein may be administered in combination with other agents as well, such as, e.g., other proteins or polypeptides or various pharmaceutically-active agents. In fact, there is virtually no limit to other components that may also be included, given that the additional agents do not cause a significant adverse effect upon contact with the target cells or host tissues. The compositions may thus be delivered along with various other agents as required in the particular instance. Such compositions may be purified from host cells or other biological sources, or alternatively may be chemically synthesized as described herein. Likewise, such compositions may further comprise substituted or derivatized RNA or DNA compositions.

[0217] Formulation of pharmaceutically-acceptable excipients and carrier solutions is well-known to those of skill in the art, as is the development of suitable dosing and treatment regimens for using the particular compositions described herein in a variety of treatment regimens, including e.g., oral, parenteral, intravenous, intranasal, and intramuscular administration and formulation.

[0218] 1. Oral Delivery

[0219] In certain applications, the pharmaceutical compositions disclosed herein may be delivered via oral administration to an animal. As such, these compositions may be formulated with an inert diluent or with an assimilable edible carrier, or they may be enclosed in hard- or soft-shell gelatin capsule, or they may be compressed into tablets, or they may be incorporated directly with the food of the diet.

[0220] The active compounds may even be incorporated with excipients and used in the form of ingestible tablets, buccal tables, troches, capsules, elixirs, suspensions, syrups, wafers, and the like (Mathiowitz et al., 1997; Hwang et al., 1998; U.S. Pat. No. 5,641,515; U.S. Pat. No. 5,580,579 and U.S. Pat. No. 5,792,451, each specifically incorporated herein by reference in its entirety). The tablets, troches, pills, capsules and the like may also contain the following: a binder, as gum tragacanth, acacia, cornstarch, or gelatin; excipients, such as dicalcium phosphate; a disintegrating agent, such as corn starch, potato starch, alginic acid and the like; a lubricant, such as magnesium stearate; and a sweetening agent, such as sucrose, lactose or saccharin may be added or a flavoring agent, such as peppermint, oil of wintergreen, or cherry flavoring. When the dosage unit form is a capsule, it may contain, in addition to materials of the above type, a liquid carrier. Various other materials may be present as coatings or to otherwise modify the physical form of the dosage unit. For instance, tablets, pills, or capsules may be coated with shellac, sugar, or both. A syrup of elixir may contain the active compound sucrose as a sweetening agent methyl and propylparabens as preservatives, a dye and flavoring, such as cherry or orange flavor. Of course, any material used in preparing any dosage unit form should be pharmaceutically pure and substantially non-toxic in the amounts employed. In addition, the active compounds may be incorporated into sustained-release preparation and formulations.

[0221] Typically, these formulations may contain at least about 0.1% of the active compound or more, although the percentage of the active ingredient(s) may, of course, be varied and may conveniently be between about 1 or 2% and about 60% or 70% or more of the weight or volume of the total formulation. Naturally, the amount of active compound(s) in each therapeutically useful composition may be prepared is such a way that a suitable dosage will be obtained in any given unit dose of the compound. Factors such as solubility, bioavailability, biological half-life, route of administration, product shelf life, as well as other pharmacological considerations will be contemplated by one skilled in the art of preparing such pharmaceutical formulations, and as such, a variety of dosages and treatment regimens may be desirable.

[0222] For oral administration the compositions of the present invention may alternatively be incorporated with one or more excipients in the form of a mouthwash, dentifrice, buccal tablet, oral spray, or sublingual orally-administered formulation. For example, a mouthwash may be prepared incorporating the active ingredient in the required amount in an appropriate solvent, such as a sodium borate solution (Dobell's Solution). Alternatively, the active ingredient may be incorporated into an oral solution such as one containing sodium borate, glycerin and potassium bicarbonate, or dispersed in a dentifrice, or added in a therapeutically-effective amount to a composition that may include water, binders, abrasives, flavoring agents, foaming agents, and humectants. Alternatively the compositions may be fashioned into a tablet or solution form that may be placed under the tongue or otherwise dissolved in the mouth.

[0223] 2. Injectable Delivery

[0224] In certain circumstances it will be desirable to deliver the pharmaceutical compositions disclosed herein parenterally, intravenously, intramuscularly, or even intraperitoneally as described in U.S. Pat. No. 5,543,158; U.S. Pat. No. 5,641,515 and U.S. Pat. No. 5,399,363 (each specifically incorporated herein by reference in its entirety). Solutions of the active compounds as free base or pharmacologically acceptable salts may be prepared in water suitably mixed with a surfactant, such as hydroxypropylcellulose. Dispersions may also be prepared in glycerol, liquid polyethylene glycols, and mixtures thereof and in oils. Under ordinary conditions of storage and use, these preparations contain a preservative to prevent the growth of microorganisms.

[0225] The pharmaceutical forms suitable for injectable use include sterile aqueous solutions or dispersions and sterile powders for the extemporaneous preparation of sterile injectable solutions or dispersions (U.S. Pat. No. 5,466,468, specifically incorporated herein by reference in its entirety). In all cases the form must be sterile and must be fluid to the extent that easy syringability exists. It must be stable under the conditions of manufacture and storage and must be preserved against the contaminating action of microorganisms, such as bacteria and fungi. The carrier can be a solvent or dispersion medium containing, for example, water, ethanol, polyol (e.g., glycerol, propylene glycol, and liquid polyethylene glycol, and the like), suitable mixtures thereof, and/or vegetable oils. Proper fluidity may be maintained, for example, by the use of a coating, such as lecithin, by the maintenance of the required particle size in the case of dispersion and by the use of surfactants. The prevention of the action of microorganisms can be facilitated by various antibacterial and antifungal agents, for example, parabens, chlorobutanol, phenol, sorbic acid, thimerosal, and the like. In many cases, it will be preferable to include isotonic agents, for example, sugars or sodium chloride. Prolonged absorption of the injectable compositions can be brought about by the use in the compositions of agents delaying absorption, for example, aluminum monostearate and gelatin.

[0226] For parenteral administration in an aqueous solution, for example, the solution should be suitably buffered if necessary and the liquid diluent first rendered isotonic with sufficient saline or glucose. These particular aqueous solutions are especially suitable for intravenous, intramuscular, subcutaneous and intraperitoneal administration. In this connection, a sterile aqueous medium that can be employed will be known to those of skill in the art in light of the present disclosure. For example, one dosage may be dissolved in 1 ml of isotonic NaCl solution and either added to 1000 ml of hypodermoclysis fluid or injected at the proposed site of infusion, (see for example, “Remington's Pharmaceutical Sciences” 15th Edition, pages 1035-1038 and 1570-1580). Some variation in dosage will necessarily occur depending on the condition of the subject being treated. The person responsible for administration will, in any event, determine the appropriate dose for the individual subject. Moreover, for human administration, preparations should meet sterility, pyrogenicity, and the general safety and purity standards as required by FDA Office of Biologics standards.

[0227] Sterile injectable solutions are prepared by incorporating the active compounds in the required amount in the appropriate solvent with various of the other ingredients enumerated above, as required, followed by filtered sterilization. Generally, dispersions are prepared by incorporating the various sterilized active ingredients into a sterile vehicle which contains the basic dispersion medium and the required other ingredients from those enumerated above. In the case of sterile powders for the preparation of sterile injectable solutions, the preferred methods of preparation are vacuum-drying and freeze-drying techniques which yield a powder of the active ingredient plus any additional desired ingredient from a previously sterile-filtered solution thereof.

[0228] The compositions disclosed herein may be formulated in a neutral or salt form. Pharmaceutically-acceptable salts, include the acid addition salts (formed with the free amino groups of the protein) and which are formed with inorganic acids such as, for example, hydrochloric or phosphoric acids, or such organic acids as acetic, oxalic, tartaric, mandelic, and the like. Salts formed with the free carboxyl groups can also be derived from inorganic bases such as, for example, sodium, potassium, ammonium, calcium, or ferric hydroxides, and such organic bases as isopropylamine, trimethylamine, histidine, procaine and the like. Upon formulation, solutions will be administered in a manner compatible with the dosage formulation and in such amount as is therapeutically effective. The formulations are easily administered in a variety of dosage forms such as injectable solutions, drug-release capsules, and the like.

[0229] As used herein, “carrier” includes any and all solvents, dispersion media, vehicles, coatings, diluents, antibacterial and antifingal agents, isotonic and absorption delaying agents, buffers, carrier solutions, suspensions, colloids, and the like. The use of such media and agents for pharmaceutical active substances is well known in the art. Except insofar as any conventional media or agent is incompatible with the active ingredient, its use in the therapeutic compositions is contemplated. Supplementary active ingredients can also be incorporated into the compositions.

[0230] The phrase “pharmaceutically-acceptable” refers to molecular entities and compositions that do not produce an allergic or similar untoward reaction when administered to a human. The preparation of an aqueous composition that contains a protein as an active ingredient is well understood in the art. Typically, such compositions are prepared as injectables, either as liquid solutions or suspensions; solid forms suitable for solution in, or suspension in, liquid prior to injection can also be prepared. The preparation can also be emulsified.

[0231] 3. Nasal Delivery

[0232] In certain embodiments, the pharmaceutical compositions may be delivered by intranasal sprays, inhalation, and/or other aerosol delivery vehicles. Methods for delivering genes, nucleic acids, and peptide compositions directly to the lungs via nasal aerosol sprays has been described e.g., in U.S. Pat. No. 5,756,353 and U.S. Pat. No. 5,804,212 (each specifically incorporated herein by reference in its entirety). Likewise, the delivery of drugs using intranasal microparticle resins (Takenaga et al., 1998) and lysophosphatidyl-glycerol compounds (U.S. Pat. No. 5,725,871, specifically incorporated herein by reference in its entirety) are also well-known in the pharmaceutical arts. Likewise, transmucosal drug delivery in the form of a polytetrafluoroetheylene support matrix is described in U.S. Pat. No. 5,780,045 (specifically incorporated herein by reference in its entirety).

[0233] 4. Liposome-, Nanocapsule-, and Microparticle-Mediated Delivery

[0234] In certain embodiments, the inventors contemplate the use of liposomes, nanocapsules, microparticles, microspheres, lipid particles, vesicles, and the like, for the introduction of the compositions of the present invention into suitable host cells. In particular, the compositions of the present invention may be formulated for delivery either encapsulated in a lipid particle, a liposome, a vesicle, a nanosphere, or a nanoparticle or the like.

[0235] Such formulations may be preferred for the introduction of pharmaceutically-acceptable formulations of the nucleic acids or constructs disclosed herein. The formation and use of liposomes is generally known to those of skill in the art (see for example, Couvreur et al., 1977; Couvreur, 1988; Lasic, 1998; which describes the use of liposomes and nanocapsules in the targeted antibiotic therapy for intracellular bacterial infections and diseases). Recently, liposomes were developed with improved serum stability and circulation half-times (Gabizon and Papahadjopoulos, 1988; Allen and Choun, 1987; U.S. Pat. No. 5,741,516, specifically incorporated herein by reference in its entirety). Further, various methods of liposome and liposome like preparations as potential drug carriers have been reviewed (Takakura, 1998; Chandran et al., 1997; Margalit, 1995; U.S. Pat. No. 5,567,434; U.S. Pat. No. 5,552,157; U.S. Pat. No. 5,565,213; U.S. Pat. No. 5,738,868 and U.S. Pat. No. 5,795,587, each specifically incorporated herein by reference in its entirety).

[0236] Liposomes have been used successfully with a number of cell types that are normally resistant to transfection by other procedures including T cell suspensions, primary hepatocyte cultures and PC 12 cells (Renneisen et al., 1990; Muller et al., 1990). In addition, liposomes are free of the DNA length constraints that are typical of viral-based delivery systems. Liposomes have been used effectively to introduce genes, drugs (Heath and Martin, 1986; Heath et al., 1986; Balazsovits et al., 1989; Fresta and Puglisi, 1996), radiotherapeutic agents (Pikul et al., 1987), enzymes (Imaizumi et al., 1990a; Imaizumi et al., 1990b), viruses (Faller and Baltimore, 1984), transcription factors and allosteric effectors (Nicolau and Gersonde, 1979) into a variety of cultured cell lines and animals. In addition, several successful clinical trails examining the effectiveness of liposome-mediated drug delivery have been completed (Lopez-Berestein et al, 1985a; 1985b; Coune, 1988; Sculier et al., 1988). Furthermore, several studies suggest that the use of liposomes is not associated with autoimmune responses, toxicity or gonadal localization after systemic delivery (Mori and Fukatsu, 1992).

[0237] Liposomes are formed from phospholipids that are dispersed in an aqueous medium and spontaneously form multilamellar concentric bilayer vesicles (also termed multilamellar vesicles (MLVs). MLVs generally have diameters of from 25 nm to 4 μm. Sonication of MLVs results in the formation of small unilamellar vesicles (SUVS) with diameters in the range of 200 to 500 Å, containing an aqueous solution in the core.

[0238] Liposomes bear resemblance to cellular membranes and are contemplated for use in connection with the present invention as carriers for the peptide compositions. They are widely suitable as both water- and lipid-soluble substances can be entrapped, i.e. in the aqueous spaces and within the bilayer itself, respectively. It is possible that the drug-bearing liposomes may even be employed for site-specific delivery of active agents by selectively modifying the liposomal formulation.

[0239] In addition to the teachings of Couvreur et al. (1977; 1988), the following information may be utilized in generating liposomal formulations. Phospholipids can form a variety of structures other than liposomes when dispersed in water, depending on the molar ratio of lipid to water. At low ratios the liposome is the preferred structure. The physical characteristics of liposomes depend on pH, ionic strength and the presence of divalent cations. Liposomes can show low permeability to ionic and polar substances, but at elevated temperatures undergo a phase transition which markedly alters their permeability. The phase transition involves a change from a closely packed, ordered structure, known as the gel state, to a loosely packed, less-ordered structure, known as the fluid state. This occurs at a characteristic phase-transition temperature and results in an increase in permeability to ions, sugars and drugs.

[0240] In addition to temperature, exposure to proteins can alter the permeability of liposomes. Certain soluble proteins, such as cytochrome c, bind, deform and penetrate the bilayer, thereby causing changes in permeability. Cholesterol inhibits this penetration of proteins, apparently by packing the phospholipids more tightly. It is contemplated that the most useful liposome formations for antibiotic and inhibitor delivery will contain cholesterol.

[0241] The ability to trap solutes varies between different types of liposomes. For example, MLVs are moderately efficient at trapping solutes, but SUVs are extremely inefficient. SUVs offer the advantage of homogeneity and reproducibility in size distribution, however, and a compromise between size and trapping efficiency is offered by large unilamellar vesicles (LUVs). These are prepared by ether evaporation and are three to four times more efficient at solute entrapment than MLVs.

[0242] In addition to liposome characteristics, an important determinant in entrapping compounds is the physicochemical properties of the compound itself. Polar compounds are trapped in the aqueous spaces and nonpolar compounds bind to the lipid bilayer of the vesicle. Polar compounds are released through permeation or when the bilayer is broken, but nonpolar compounds remain affiliated with the bilayer unless it is disrupted by temperature or exposure to lipoproteins. Both types show maximum efflux rates at the phase transition temperature.

[0243] Liposomes interact with cells via four different mechanisms: Endocytosis by phagocytic cells of the reticuloendothelial system such as macrophages and neutrophils; adsorption to the cell surface, either by nonspecific weak hydrophobic or electrostatic forces, or by specific interactions with cell-surface components; fusion with the plasma cell membrane by insertion of the lipid bilayer of the liposome into the plasma membrane, with simultaneous release of liposomal contents into the cytoplasm; and by transfer of liposomal lipids to cellular or subcellular membranes, or vice versa, without any association of the liposome contents. It often is difficult to determine which mechanism is operative and more than one may operate at the same time.

[0244] The fate and disposition of intravenously injected liposomes depend on their physical properties, such as size, fluidity, and surface charge. They may persist in tissues for h or days, depending on their composition, and half lives in the blood range from min to several h. Larger liposomes, such as MLVs and LUVs, are taken up rapidly by phagocytic cells of the reticuloendothelial system, but physiology of the circulatory system restrains the exit of such large species at most sites. They can exit only in places where large openings or pores exist in the capillary endothelium, such as the sinusoids of the liver or spleen. Thus, these organs are the predominate site of uptake. On the other hand, SUVs show a broader tissue distribution but still are sequestered highly in the liver and spleen. In general, this in vivo behavior limits the potential targeting of liposomes to only those organs and tissues accessible to their large size. These include the blood, liver, spleen, bone marrow, and lymphoid organs.

[0245] Targeting is generally not a limitation in terms of the present invention. However, should specific targeting be desired, methods are available for this to be accomplished. Antibodies may be used to bind to the liposome surface and to direct the antibody and its drug contents to specific antigenic receptors located on a particular cell-type surface. Carbohydrate determinants (glycoprotein or glycolipid cell-surface components that play a role in cell-cell recognition, interaction and adhesion) may also be used as recognition sites as they have potential in directing liposomes to particular cell types. Mostly, it is contemplated that intravenous injection of liposomal preparations would be used, but other routes of administration are also conceivable.

[0246] Alternatively, the invention provides for pharmaceutically-acceptable nanocapsule formulations of the compositions of the present invention. Nanocapsules can generally entrap compounds in a stable and reproducible way (Henry-Michelland et al., 1987; Quintanar-Guerrero et al., 1998; Douglas et al., 1987). To avoid side effects due to intracellular polymeric overloading, such ultrafine particles (sized around 0.1 μm) should be designed using polymers able to be degraded in vivo. Biodegradable polyalkyl-cyanoacrylate nanoparticles that meet these requirements are contemplated for use in the present invention. Such particles may be are easily made, as described (Couvreur et al., 1980; 1988; zur Muhlen et al., 1998; Zambaux et al. 1998; Pinto-Alphandry et al., 1995 and U.S. Pat. No. 5,145,684, specifically incorporated herein by reference in its entirety).

### Vaccines

[0247] In certain preferred embodiments, pharmaceutical compositions comprising vaccines are provided. The vaccines will generally comprise one or more pharmaceutical compositions, such as those discussed above, in combination with an immunostimulant. An immunostimulant may be any substance that enhances or potentiates an immune response (antibody and/or cell-mediated) to an exogenous antigen. Examples of immunostimulants include adjuvants, biodegradable microspheres (e.g., polylactic galactide) and liposomes (into which the compound is incorporated; see e.g., Fullerton, U.S. Pat. No. 4,235,877). Vaccine preparation is generally described in, for example, M. F. Powell and M. J. Newman, eds., “Vaccine Design (the subunit and adjuvant approach),” Plenum Press (NY, 1995). Pharmaceutical compositions and vaccines within the scope of the present invention may also contain other compounds, which may be biologically active or inactive. For example, one or more immunogenic portions of other tumor antigens may be present, either incorporated into a fusion polypeptide or as a separate compound, within the composition or vaccine.

[0248] Illustrative vaccines may contain DNA encoding one or more of the polypeptides as described above, such that the polypeptide is generated in situ. As noted above, the DNA may be present within any of a variety of delivery systems known to those of ordinary skill in the art, including nucleic acid expression systems, bacteria and viral expression systems. Numerous gene delivery techniques are well known in the art, such as those described by Rolland, Crit. Rev. Therap. Drug Carrier Systems 15:143-198, 1998, and references cited therein. Appropriate nucleic acid expression systems contain the necessary DNA sequences for expression in the patient (such as a suitable promoter and terminating signal). Bacterial delivery systems involve the administration of a bacterium (such as Bacillus-Calmette-Guerrin) that expresses an immunogenic portion of the polypeptide on its cell surface or secretes such an epitope. In a preferred embodiment, the DNA may be introduced using a viral expression system (e.g., vaccinia or other pox virus, retrovirus, or adenovirus), which may involve the use of a non-pathogenic (defective), replication competent virus. Suitable systems are disclosed, for example, in Fisher-Hoch et al., Proc. Natl. Acad. Sci. USA 86:317-321, 1989; Flexner et al., Ann. N.Y. Acad. Sci. 569:86-103, 1989; Flexner et al., Vaccine 8:17-21, 1990; U.S. Pat. Nos. 4,603,112, 4,769,330, and 5,017,487; WO 89/01973; U.S. Pat. No. 4,777,127; GB 2,200,651; EP 0,345,242; WO 91/02805; Berkner, Biotechniques 6:616-627, 1988; Rosenfeld et al., Science 252:431-434, 1991; Kolls et al., Proc. Natl. Acad. Sci. USA 91:215-219, 1994; Kass-Eisler et al., Proc. Natl Acad. Sci. USA 90:11498-11502, 1993; Guzman et al., Circulation 88:2838-2848, 1993; and Guzman et al., Cir. Res. 73:1202-1207, 1993. Techniques for incorporating DNA into such expression systems are well known to those of ordinary skill in the art. The DNA may also be “naked,” as described, for example, in Ulmer et al., Science 259:1745-1749, 1993 and reviewed by Cohen, Science 259:1691-1692, 1993. The uptake of naked DNA may be increased by coating the DNA onto biodegradable beads, which are efficiently transported into the cells. It will be apparent that a vaccine may comprise both a polynucleotide and a polypeptide component. Such vaccines may provide for an enhanced immune response.

[0249] It will be apparent that a vaccine may contain pharmaceutically acceptable salts of the polynucleotides and polypeptides provided herein. Such salts may be prepared from pharmaceutically acceptable non-toxic bases, including organic bases (e.g., salts of primary, secondary and tertiary amines and basic amino acids) and inorganic bases (e.g., sodium, potassium, lithium, ammonium, calcium and magnesium salts).

[0250] While any suitable carrier known to those of ordinary skill in the art may be employed in the vaccine compositions of this invention, the type of carrier will vary depending on the mode of administration. Compositions of the present invention may be formulated for any appropriate manner of administration, including for example, topical, oral, nasal, intravenous, intracranial, intraperitoneal, subcutaneous or intramuscular administration. For parenteral administration, such as subcutaneous injection, the carrier preferably comprises water, saline, alcohol, a fat, a wax or a buffer. For oral administration, any of the above carriers or a solid carrier, such as mannitol, lactose, starch, magnesium stearate, sodium saccharine, talcum, cellulose, glucose, sucrose, and magnesium carbonate, may be employed. Biodegradable microspheres (e.g., polylactate polyglycolate) may also be employed as carriers for the pharmaceutical compositions of this invention. Suitable biodegradable microspheres are disclosed, for example, in U.S. Pat. Nos. 4,897,268; 5,075,109; 5,928,647; 5,811,128; 5,820,883; 5,853,763; 5,814,344 and 5,942,252. One may also employ a carrier comprising the particulate-protein complexes described in U.S. Pat. No. 5,928,647, which are capable of inducing a class I-restricted cytotoxic T lymphocyte responses in a host.

[0251] Such compositions may also comprise buffers (e.g., neutral buffered saline or phosphate buffered saline), carbohydrates (e.g., glucose, mannose, sucrose or dextrans), mannitol, proteins, polypeptides or amino acids such as glycine, antioxidants, bacteriostats, chelating agents such as EDTA or glutathione, adjuvants (e.g., aluminum hydroxide), solutes that render the formulation isotonic, hypotonic or weakly hypertonic with the blood of a recipient, suspending agents, thickening agents and/or preservatives. Alternatively, compositions of the present invention may be formulated as a lyophilizate. Compounds may also be encapsulated within liposomes using well known technology.

[0252] Any of a variety of immunostimulants may be employed in the vaccines of this invention. For example, an adjuvant may be included. Most adjuvants contain a substance designed to protect the antigen from rapid catabolism, such as aluminum hydroxide or mineral oil, and a stimulator of immune responses, such as lipid A, Bortadella pertussis or Mycobacterium tuberculosis derived proteins. Suitable adjuvants are commercially available as, for example, Freund's Incomplete Adjuvant and Complete Adjuvant (Difco Laboratories, Detroit, Mich.); Merck Adjuvant 65 (Merck and Company, Inc., Rahway, N.J.); AS-2 (SmithKline Beecham, Philadelphia, Pa.); aluminum salts such as aluminum hydroxide gel (alum) or aluminum phosphate; salts of calcium, iron or zinc; an insoluble suspension of acylated tyrosine; acylated sugars; cationically or anionically derivatized polysaccharides; polyphosphazenes; biodegradable microspheres; monophosphoryl lipid A and quil A. Cytokines, such as GM-CSF or interleukin-2, -7, or -12, may also be used as adjuvants.

[0253] Within the vaccines provided herein, the adjuvant composition is preferably designed to induce an immune response predominantly of the Th1 type. High levels of Th1-type cytokines (e.g., IFN-γ, TNFα, IL-2 and IL-12) tend to favor the induction of cell mediated immune responses to an administered antigen. In contrast, high levels of Th2-type cytokines (e.g., IL-4, IL-5, IL-6 and IL-10) tend to favor the induction of humoral immune responses. Following application of a vaccine as provided herein, a patient will support an immune response that includes Th1- and Th2-type responses. Within a preferred embodiment, in which a response is predominantly Th1-type, the level of Th1-type cytokines will increase to a greater extent than the level of Th2-type cytokines. The levels of these cytokines may be readily assessed using standard assays. For a review of the families of cytokines, see Mosmann and Coffman, Ann. Rev. Immunol. 7:145-173, 1989.

[0254] Preferred adjuvants for use in eliciting a predominantly Th1-type response include, for example, a combination of monophosphoryl lipid A, preferably 3-de-O-acylated monophosphoryl lipid A (3D-MPL), together with an aluminum salt. MPL adjuvants are available from Corixa Corporation (Seattle, Wash.; see U.S. Pat. Nos. 4,436,727; 4,877,611; 4,866,034 and 4,912,094). CpG-containing oligonucleotides (in which the CpG dinucleotide is unmethylated) also induce a predominantly Th1 response. Such oligonucleotides are well known and are described, for example, in WO 96/02555, WO 99/33488 and U.S. Pat. Nos. 6,008,200 and 5,856,462. Immunostimulatory DNA sequences are also described, for example, by Sato et al., Science 273:352, 1996. Another preferred adjuvant is a saponin, preferably QS21 (Aquila Biopharmaceuticals Inc., Framingham, Mass.), which may be used alone or in combination with other adjuvants. For example, an enhanced system involves the combination of a monophosphoryl lipid A and saponin derivative, such as the combination of QS21 and 3D-MPL as described in WO 94/00153, or a less reactogenic composition where the QS21 is quenched with cholesterol, as described in WO 96/33739. Other preferred formulations comprise an oil-in-water emulsion and tocopherol. A particularly potent adjuvant formulation involving QS21, 3D-MPL and tocopherol in an oil-in-water emulsion is described in WO 95/17210.

[0255] Other preferred adjuvants include Montanide ISA 720 (Seppic, France), SAF (Chiron, Calif., United States), ISCOMS (CSL), MF-59 (Chiron), the SBAS series of adjuvants (e.g., SBAS-2 or SBAS-4, available from SmithKline Beecham, Rixensart, Belgium), Detox (Corixa, Hamilton, Mont.), RC-529 (Corixa, Hamilton, Mont.) and other aminoalkyl glucosaminide 4-phosphates (AGPs), such as those described in pending U.S. patent application Ser. Nos. 08/853,826 and 09/074,720, the disclosures of which are incorporated herein by reference in their entireties.

[0256] Any vaccine provided herein may be prepared using well known methods that result in a combination of antigen, immune response enhancer and a suitable carrier or excipient. The compositions described herein may be administered as part of a sustained release formulation (i.e., a formulation such as a capsule, sponge or gel (composed of polysaccharides, for example) that effects a slow release of compound following administration). Such formulations may generally be prepared using well known technology (see, e.g., Coombes et al., Vaccine 14:1429-1438, 1996) and administered by, for example, oral, rectal or subcutaneous implantation, or by implantation at the desired target site. Sustained-release formulations may contain a polypeptide, polynucleotide or antibody dispersed in a carrier matrix and/or contained within a reservoir surrounded by a rate controlling membrane.

[0257] Carriers for use within such formulations are biocompatible, and may also be biodegradable; preferably the formulation provides a relatively constant level of active component release. Such carriers include microparticles of poly(lactide-co-glycolide), polyacrylate, latex, starch, cellulose, dextran and the like. Other delayed-release carriers include supramolecular biovectors, which comprise a non-liquid hydrophilic core (e.g., a cross-linked polysaccharide or oligosaccharide) and, optionally, an external layer comprising an amphiphilic compound, such as a phospholipid (see e.g., U.S. Pat. No. 5,151,254 and PCT applications WO 94/20078, WO/94/23701 and WO 96/06638). The amount of active compound contained within a sustained release formulation depends upon the site of implantation, the rate and expected duration of release and the nature of the condition to be treated or prevented.

[0258] Any of a variety of delivery vehicles may be employed within pharmaceutical compositions and vaccines to facilitate production of an antigen-specific immune response that targets tumor cells. Delivery vehicles include antigen presenting cells (APCs), such as dendritic cells, macrophages, B cells, monocytes and other cells that may be engineered to be efficient APCs. Such cells may, but need not, be genetically modified to increase the capacity for presenting the antigen, to improve activation and/or maintenance of the T cell response, to have anti-tumor effects per se and/or to be immunologically compatible with the receiver (i.e., matched HLA haplotype). APCs may generally be isolated from any of a variety of biological fluids and organs, including tumor and peritumoral tissues, and may be autologous, allogeneic, syngeneic or xenogeneic cells.

[0259] Certain preferred embodiments of the present invention use dendritic cells or progenitors thereof as antigen-presenting cells. Dendritic cells are highly potent APCs (Banchereau and Steinman, Nature 392:245-251, 1998) and have been shown to be effective as a physiological adjuvant for eliciting prophylactic or therapeutic antitumor immunity (see Timmerman and Levy, Ann. Rev. Med. 50:507-529, 1999). In general, dendritic cells may be identified based on their typical shape (stellate in situ, with marked cytoplasmic processes (dendrites) visible in vitro), their ability to take up, process and present antigens with high efficiency and their ability to activate naive T cell responses. Dendritic cells may, of course, be engineered to express specific cell-surface receptors or ligands that are not commonly found on dendritic cells in vivo or ex vivo, and such modified dendritic cells are contemplated by the present invention. As an alternative to dendritic cells, secreted vesicles antigen-loaded dendritic cells (called exosomes) may be used within a vaccine (see Zitvogel et al., Nature Med. 4:594-600, 1998).

[0260] Dendritic cells and progenitors may be obtained from peripheral blood, bone marrow, tumor-infiltrating cells, peritumoral tissues-infiltrating cells, lymph nodes, spleen, skin, umbilical cord blood or any other suitable tissue or fluid. For example, dendritic cells may be differentiated ex vivo by adding a combination of cytokines such as GM-CSF, IL-4, IL-13 and/or TNFα to cultures of monocytes harvested from peripheral blood. Alternatively, CD34 positive cells harvested from peripheral blood, umbilical cord blood or bone marrow may be differentiated into dendritic cells by adding to the culture medium combinations of GM-CSF, IL-3, TNFα, CD40 ligand, LPS, flt3 ligand and/or other compound(s) that induce differentiation, maturation and proliferation of dendritic cells.

[0261] Dendritic cells are conveniently categorized as “immature” and “mature” cells, which allows a simple way to discriminate between two well characterized phenotypes. However, this nomenclature should not be construed to exclude all possible intermediate stages of differentiation. Immature dendritic cells are characterized as APC with a high capacity for antigen uptake and processing, which correlates with the high expression of Fcy receptor and mannose receptor. The mature phenotype is typically characterized by a lower expression of these markers, but a high expression of cell surface molecules responsible for T cell activation such as class I and class II MHC, adhesion molecules (e.g., CD54 and CD11) and costimulatory molecules (e.g., CD40, CD80, CD86 and 4-1BB).

[0262] APCs may generally be transfected with a polynucleotide encoding an ovarian tumor protein (or portion or other variant thereof) such that the ovarian tumor polypeptide, or an immunogenic portion thereof, is expressed on the cell surface. Such transfection may take place ex vivo, and a composition or vaccine comprising such transfected cells may then be used for therapeutic purposes, as described herein. Alternatively, a gene delivery vehicle that targets a dendritic or other antigen presenting cell may be administered to a patient, resulting in transfection that occurs in vivo. In vivo and ex vivo transfection of dendritic cells, for example, may generally be performed using any methods known in the art, such as those described in WO 97/24447, or the gene gun approach described by Mahvi et al., Immunology and cell Biology 75:456-460, 1997. Antigen loading of dendritic cells may be achieved by incubating dendritic cells or progenitor cells with the ovarian tumor polypeptide, DNA (naked or within a plasmid vector) or RNA; or with antigen-expressing recombinant bacterium or viruses (e.g., vaccinia, fowlpox, adenovirus or lentivirus vectors). Prior to loading, the polypeptide may be covalently conjugated to an immunological partner that provides T cell help (e.g., a carrier molecule). Alternatively, a dendritic cell may be pulsed with a non-conjugated immunological partner, separately or in the presence of the polypeptide.

[0263] Vaccines and pharmaceutical compositions may be presented in unit-dose or multi-dose containers, such as sealed ampoules or vials. Such containers are preferably hermetically sealed to preserve sterility of the formulation until use. In general, formulations may be stored as suspensions, solutions or emulsions in oily or aqueous vehicles. Alternatively, a vaccine or pharmaceutical composition may be stored in a freeze-dried condition requiring only the addition of a sterile liquid carrier immediately prior to use.

### Cancer Therapy

[0264] In further aspects of the present invention, the compositions described herein may be used for immunotherapy of cancer, such as ovarian cancer. Within such methods, pharmaceutical compositions and vaccines are typically administered to a patient. As used herein, a “patient” refers to any warm-blooded animal, preferably a human. A patient may or may not be afflicted with cancer. Accordingly, the above pharmaceutical compositions and vaccines may be used to prevent the development of a cancer or to treat a patient afflicted with a cancer. A cancer may be diagnosed using criteria generally accepted in the art, including the presence of a malignant tumor. Pharmaceutical compositions and vaccines may be administered either prior to or following surgical removal of primary tumors and/or treatment such as administration of radiotherapy or conventional chemotherapeutic drugs. Administration may be by any suitable method, including administration by intravenous, intraperitoneal, intramuscular, subcutaneous, intranasal, intradermal, anal, vaginal, topical and oral routes.

[0265] Within certain embodiments, immunotherapy may be active immunotherapy, in which treatment relies on the in vivo stimulation of the endogenous host immune system to react against tumors with the administration of immune response-modifying agents (such as polypeptides and polynucleotides as provided herein).

[0266] Within other embodiments, immunotherapy may be passive immunotherapy, in which treatment involves the delivery of agents with established tumor-immune reactivity (such as effector cells or antibodies) that can directly or indirectly mediate antitumor effects and does not necessarily depend on an intact host immune system. Examples of effector cells include T cells as discussed above, T lymphocytes (such as CD8⁺ cytotoxic T lymphocytes and CD4⁺ T-helper tumor-infiltrating lymphocytes), killer cells (such as Natural Killer cells and lymphokine-activated killer cells), B cells and antigen-presenting cells (such as dendritic cells and macrophages) expressing a polypeptide provided herein. T cell receptors and antibody receptors specific for the polypeptides recited herein may be cloned, expressed and transferred into other vectors or effector cells for adoptive immunotherapy. The polypeptides provided herein may also be used to generate antibodies or anti-idiotypic antibodies (as described above and in U.S. Pat. No. 4,918,164) for passive immunotherapy.

[0267] Effector cells may generally be obtained in sufficient quantities for adoptive immunotherapy by growth in vitro, as described herein. Culture conditions for expanding single antigen-specific effector cells to several billion in number with retention of antigen recognition in vivo are well known in the art. Such in vitro culture conditions typically use intermittent stimulation with antigen, often in the presence of cytokines (such as IL-2) and non-dividing feeder cells. As noted above, immunoreactive polypeptides as provided herein may be used to rapidly expand antigen-specific T cell cultures in order to generate a sufficient number of cells for immunotherapy. In particular, antigen-presenting cells, such as dendritic, macrophage, monocyte, fibroblast and/or B cells, may be pulsed with immunoreactive polypeptides or transfected with one or more polynucleotides using standard techniques well known in the art. For example, antigen-presenting cells can be transfected with a polynucleotide having a promoter appropriate for increasing expression in a recombinant virus or other expression system. Cultured effector cells for use in therapy must be able to grow and distribute widely, and to survive long term in vivo. Studies have shown that cultured effector cells can be induced to grow in vivo and to survive long term in substantial numbers by repeated stimulation with antigen supplemented with IL-2 (see, for example, Cheever et al., Immunological Reviews 157:177, 1997).

[0268] Alternatively, a vector expressing a polypeptide recited herein may be introduced into antigen presenting cells taken from a patient and clonally propagated ex vivo for transplant back into the same patient. Transfected cells may be reintroduced into the patient using any means known in the art, preferably in sterile form by intravenous, intracavitary, intraperitoneal or intratumor administration.

[0269] Routes and frequency of administration of the therapeutic compositions described herein, as well as dosage, will vary from individual to individual, and may be readily established using standard techniques. In general, the pharmaceutical compositions and vaccines may be administered by injection (e.g., intracutaneous, intramuscular, intravenous or subcutaneous), intranasally (e.g., by aspiration) or orally. Preferably, between 1 and 10 doses may be administered over a 52 week period. Preferably, 6 doses are administered, at intervals of 1 month, and booster vaccinations may be given periodically thereafter. Alternate protocols may be appropriate for individual patients. A suitable dose is an amount of a compound that, when administered as described above, is capable of promoting an anti-tumor immune response, and is at least 10-50% above the basal (i.e., untreated) level. Such response can be monitored by measuring the anti-tumor antibodies in a patient or by vaccine-dependent generation of cytolytic effector cells capable of killing the patient's tumor cells in vitro. Such vaccines should also be capable of causing an immune response that leads to an improved clinical outcome (e.g., more frequent remissions, complete or partial or longer disease-free survival) in vaccinated patients as compared to non-vaccinated patients. In general, for pharmaceutical compositions and vaccines comprising one or more polypeptides, the amount of each polypeptide present in a dose ranges from about 25 μg to 5 mg per kg of host. Suitable dose sizes will vary with the size of the patient, but will typically range from about 0.1 mL to about 5 mL.

[0270] In general, an appropriate dosage and treatment regimen provides the active compound(s) in an amount sufficient to provide therapeutic and/or prophylactic benefit. Such a response can be monitored by establishing an improved clinical outcome (e.g., more frequent remissions, complete or partial, or longer disease-free survival) in treated patients as compared to non-treated patients. Increases in preexisting immune responses to an ovarian tumor protein generally correlate with an improved clinical outcome. Such immune responses may generally be evaluated using standard proliferation, cytotoxicity or cytokine assays, which may be performed using samples obtained from a patient before and after treatment.

### Cancer Detection and Diagnosis

[0271] In general, a cancer may be detected in a patient based on the presence of one or more ovarian tumor proteins and/or polynucleotides encoding such proteins in a biological sample (for example, blood, sera, sputum urine and/or tumor biopsies) obtained from the patient. In other words, such proteins may be used as markers to indicate the presence or absence of a cancer such as ovarian cancer. In addition, such proteins may be useful for the detection of other cancers. The binding agents provided herein generally permit detection of the level of antigen that binds to the agent in the biological sample. Polynucleotide primers and probes may be used to detect the level of mRNA encoding a tumor protein, which is also indicative of the presence or absence of a cancer. In general, an ovarian tumor sequence should be present at a level that is at least three fold higher in tumor tissue than in normal tissue

[0272] There are a variety of assay formats known to those of ordinary skill in the art for using a binding agent to detect polypeptide markers in a sample. See, e.g., Harlow and Lane, Antibodies. A Laboratory Manual, Cold Spring Harbor Laboratory, 1988. In general, the presence or absence of a cancer in a patient may be determined by (a) contacting a biological sample obtained from a patient with a binding agent; (b) detecting in the sample a level of polypeptide that binds to the binding agent; and (c) comparing the level of polypeptide with a predetermined cut-off value.

[0273] In a preferred embodiment, the assay involves the use of binding agent immobilized on a solid support to bind to and remove the polypeptide from the remainder of the sample. The bound polypeptide may then be detected using a detection reagent that contains a reporter group and specifically binds to the binding agent/polypeptide complex. Such detection reagents may comprise, for example, a binding agent that specifically binds to the polypeptide or an antibody or other agent that specifically binds to the binding agent, such as an anti-immunoglobulin, protein G, protein A or a lectin. Alternatively, a competitive assay may be utilized, in which a polypeptide is labeled with a reporter group and allowed to bind to the immobilized binding agent after incubation of the binding agent with the sample. The extent to which components of the sample inhibit the binding of the labeled polypeptide to the binding agent is indicative of the reactivity of the sample with the immobilized binding agent. Suitable polypeptides for use within such assays include full length ovarian tumor proteins and portions thereof to which the binding agent binds, as described above.

[0274] The solid support may be any material known to those of ordinary skill in the art to which the tumor protein may be attached. For example, the solid support may be a test well in a microtiter plate or a nitrocellulose or other suitable membrane. Alternatively, the support may be a bead or disc, such as glass, fiberglass, latex or a plastic material such as polystyrene or polyvinylchloride. The support may also be a magnetic particle or a fiber optic sensor, such as those disclosed, for example, in U.S. Pat. No. 5,359,681. The binding agent may be immobilized on the solid support using a variety of techniques known to those of skill in the art, which are amply described in the patent and scientific literature. In the context of the present invention, the term “immobilization” refers to both noncovalent association, such as adsorption, and covalent attachment (which may be a direct linkage between the agent and functional groups on the support or may be a linkage by way of a cross-linking agent). Immobilization by adsorption to a well in a microtiter plate or to a membrane is preferred. In such cases, adsorption may be achieved by contacting the binding agent, in a suitable buffer, with the solid support for a suitable amount of time. The contact time varies with temperature, but is typically between about 1 hour and about 1 day. In general, contacting a well of a plastic microtiter plate (such as polystyrene or polyvinylchloride) with an amount of binding agent ranging from about 10 ng to about 10 μg, and preferably about 100 ng to about 1 μg, is sufficient to immobilize an adequate amount of binding agent.

[0275] Covalent attachment of binding agent to a solid support may generally be achieved by first reacting the support with a bifunctional reagent that will react with both the support and a functional group, such as a hydroxyl or amino group, on the binding agent. For example, the binding agent may be covalently attached to supports having an appropriate polymer coating using benzoquinone or by condensation of an aldehyde group on the support with an amine and an active hydrogen on the binding partner (see, e.g., Pierce Immunotechnology Catalog and Handbook, 1991, at A12-A13).

[0276] In certain embodiments, the assay is a two-antibody sandwich assay. This assay may be performed by first contacting an antibody that has been immobilized on a solid support, commonly the well of a microtiter plate, with the sample, such that polypeptides within the sample are allowed to bind to the immobilized antibody. Unbound sample is then removed from the immobilized polypeptide-antibody complexes and a detection reagent (preferably a second antibody capable of binding to a different site on the polypeptide) containing a reporter group is added. The amount of detection reagent that remains bound to the solid support is then determined using a method appropriate for the specific reporter group.

[0277] More specifically, once the antibody is immobilized on the support as described above, the remaining protein binding sites on the support are typically blocked. Any suitable blocking agent known to those of ordinary skill in the art, such as bovine serum albumin or Tween 20™ (Sigma Chemical Co., St. Louis, Mo.). The immobilized antibody is then incubated with the sample, and polypeptide is allowed to bind to the antibody. The sample may be diluted with a suitable diluent, such as phosphate-buffered saline (PBS) prior to incubation. In general, an appropriate contact time (i.e., incubation time) is a period of time that is sufficient to detect the presence of polypeptide within a sample obtained from an individual with ovarian cancer. Preferably, the contact time is sufficient to achieve a level of binding that is at least about 95% of that achieved at equilibrium between bound and unbound polypeptide. Those of ordinary skill in the art will recognize that the time necessary to achieve equilibrium may be readily determined by assaying the level of binding that occurs over a period of time. At room temperature, an incubation time of about 30 minutes is generally sufficient.

[0278] Unbound sample may then be removed by washing the solid support with an appropriate buffer, such as PBS containing 0.1% Tween 20™. The second antibody, which contains a reporter group, may then be added to the solid support. Preferred reporter groups include those groups recited above.

[0279] The detection reagent is then incubated with the immobilized antibody-polypeptide complex for an amount of time sufficient to detect the bound polypeptide. An appropriate amount of time may generally be determined by assaying the level of binding that occurs over a period of time. Unbound detection reagent is then removed and bound detection reagent is detected using the reporter group. The method employed for detecting the reporter group depends upon the nature of the reporter group. For radioactive groups, scintillation counting or autoradiographic methods are generally appropriate. Spectroscopic methods may be used to detect dyes, luminescent groups and fluorescent groups. Biotin may be detected using avidin, coupled to a different reporter group (commonly a radioactive or fluorescent group or an enzyme). Enzyme reporter groups may generally be detected by the addition of substrate (generally for a specific period of time), followed by spectroscopic or other analysis of the reaction products.

[0280] To determine the presence or absence of a cancer, such as ovarian cancer, the signal detected from the reporter group that remains bound to the solid support is generally compared to a signal that corresponds to a predetermined cut-off value. In one preferred embodiment, the cut-off value for the detection of a cancer is the average mean signal obtained when the immobilized antibody is incubated with samples from patients without the cancer. In general, a sample generating a signal that is three standard deviations above the predetermined cut-off value is considered positive for the cancer. In an alternate preferred embodiment, the cut-off value is determined using a Receiver Operator Curve, according to the method of Sackett et al., Clinical Epidemiology: A Basic Science for Clinical Medicine, Little Brown and Co., 1985, p. 106-7. Briefly, in this embodiment, the cut-off value may be determined from a plot of pairs of true positive rates (i.e., sensitivity) and false positive rates (100%-specificity) that correspond to each possible cut-off value for the diagnostic test result. The cut-off value on the plot that is the closest to the upper left-hand corner (i.e., the value that encloses the largest area) is the most accurate cut-off value, and a sample generating a signal that is higher than the cut-off value determined by this method may be considered positive. Alternatively, the cut-off value may be shifted to the left along the plot, to minimize the false positive rate, or to the right, to minimize the false negative rate. In general, a sample generating a signal that is higher than the cut-off value determined by this method is considered positive for a cancer.

[0281] In a related embodiment, the assay is performed in a flow-through or strip test format, wherein the binding agent is immobilized on a membrane, such as nitrocellulose. In the flow-through test, polypeptides within the sample bind to the immobilized binding agent as the sample passes through the membrane. A second, labeled binding agent then binds to the binding agent-polypeptide complex as a solution containing the second binding agent flows through the membrane. The detection of bound second binding agent may then be performed as described above. In the strip test format, one end of the membrane to which binding agent is bound is immersed in a solution containing the sample. The sample migrates along the membrane through a region containing second binding agent and to the area of immobilized binding agent. Concentration of second binding agent at the area of immobilized antibody indicates the presence of a cancer. Typically, the concentration of second binding agent at that site generates a pattern, such as a line, that can be read visually. The absence of such a pattern indicates a negative result. In general, the amount of binding agent immobilized on the membrane is selected to generate a visually discernible pattern when the biological sample contains a level of polypeptide that would be sufficient to generate a positive signal in the two-antibody sandwich assay, in the format discussed above. Preferred binding agents for use in such assays are antibodies and antigen-binding fragments thereof. Preferably, the amount of antibody immobilized on the membrane ranges from about 25 ng to about 1 μg, and more preferably from about 50 ng to about 500 ng. Such tests can typically be performed with a very small amount of biological sample.

[0282] Of course, numerous other assay protocols exist that are suitable for use with the tumor proteins or binding agents of the present invention. The above descriptions are intended to be exemplary only. For example, it will be apparent to those of ordinary skill in the art that the above protocols may be readily modified to use ovarian tumor polypeptides to detect antibodies that bind to such polypeptides in a biological sample. The detection of such ovarian tumor protein specific antibodies may correlate with the presence of a cancer.

[0283] A cancer may also, or alternatively, be detected based on the presence of T cells that specifically react with an ovarian tumor protein in a biological sample. Within certain methods, a biological sample comprising CD4⁺ and/or CD8⁺ T cells isolated from a patient is incubated with an ovarian tumor polypeptide, a polynucleotide encoding such a polypeptide and/or an APC that expresses at least an immunogenic portion of such a polypeptide, and the presence or absence of specific activation of the T cells is detected. Suitable biological samples include, but are not limited to, isolated T cells. For example, T cells may be isolated from a patient by routine techniques (such as by Ficoll/Hypaque density gradient centrifugation of peripheral blood lymphocytes). T cells may be incubated in vitro for 2-9 days (typically 4 days) at 37° C. with polypeptide (e.g., 5-25 μg/ml). It may be desirable to incubate another aliquot of a T cell sample in the absence of an ovarian tumor polypeptide to serve as a control. For CD4⁺ T cells, activation is preferably detected by evaluating proliferation of the T cells. For CD8⁺ T cells, activation is preferably detected by evaluating cytolytic activity. A level of proliferation that is at least two fold greater and/or a level of cytolytic activity that is at least 20% greater than in disease-free patients indicates the presence of a cancer in the patient.

[0284] As noted above, a cancer may also, or alternatively, be detected based on the level of mRNA encoding an ovarian tumor protein in a biological sample. For example, at least two oligonucleotide primers may be employed in a polymerase chain reaction (PCR) based assay to amplify a portion of an ovarian tumor cDNA derived from a biological sample, wherein at least one of the oligonucleotide primers is specific for (i.e., hybridizes to) a polynucleotide encoding the ovarian tumor protein. The amplified cDNA is then separated and detected using techniques well known in the art, such as gel electrophoresis. Similarly, oligonucleotide probes that specifically hybridize to a polynucleotide encoding an ovarian tumor protein may be used in a hybridization assay to detect the presence of polynucleotide encoding the tumor protein in a biological sample.

[0285] To permit hybridization under assay conditions, oligonucleotide primers and probes should comprise an oligonucleotide sequence that has at least about 60%, preferably at least about 75% and more preferably at least about 90%, identity to a portion of a polynucleotide encoding an ovarian tumor protein that is at least 10 nucleotides, and preferably at least 20 nucleotides, in length. Preferably, oligonucleotide primers and/or probes hybridize to a polynucleotide encoding a polypeptide described herein under moderately stringent conditions, as defined above. Oligonucleotide primers and/or probes which may be usefully employed in the diagnostic methods described herein preferably are at least 10-40 nucleotides in length. In a preferred embodiment, the oligonucleotide primers comprise at least 10 contiguous nucleotides, more preferably at least 15 contiguous nucleotides, of a DNA molecule having a sequence recited in SEQ ID NOs:1-1737. Techniques for both PCR based assays and hybridization assays are well known in the art (see, for example, Mullis et al., Cold Spring Harbor Symp. Quant. Biol., 51:263, 1987; Erlich ed., PCR Technology, Stockton Press, N.Y., 1989).

[0286] One preferred assay employs RT-PCR, in which PCR is applied in conjunction with reverse transcription. Typically, RNA is extracted from a biological sample, such as biopsy tissue, and is reverse transcribed to produce cDNA molecules. PCR amplification using at least one specific primer generates a cDNA molecule, which may be separated and visualized using, for example, gel electrophoresis. Amplification may be performed on biological samples taken from a test patient and from an individual who is not afflicted with a cancer. The amplification reaction may be performed on several dilutions of cDNA spanning two orders of magnitude. A two-fold or greater increase in expression in several dilutions of the test patient sample as compared to the same dilutions of the non-cancerous sample is typically considered positive.

[0287] In another embodiment, the compositions described herein may be used as markers for the progression of cancer. In this embodiment, assays as described above for the diagnosis of a cancer may be performed over time, and the change in the level of reactive polypeptide(s) or polynucleotide(s) evaluated. For example, the assays may be performed every 24-72 hours for a period of 6 months to 1 year, and thereafter performed as needed. In general, a cancer is progressing in those patients in whom the level of polypeptide or polynucleotide detected increases over time. In contrast, the cancer is not progressing when the level of reactive polypeptide or polynucleotide either remains constant or decreases with time.

[0288] Certain in vivo diagnostic assays may be performed directly on a tumor. One such assay involves contacting tumor cells with a binding agent. The bound binding agent may then be detected directly or indirectly via a reporter group. Such binding agents may also be used in histological applications. Alternatively, polynucleotide probes may be used within such applications.

[0289] As noted above, to improve sensitivity, multiple ovarian tumor protein markers may be assayed within a given sample. It will be apparent that binding agents specific for different proteins provided herein may be combined within a single assay. Further, multiple primers or probes may be used concurrently. The selection of tumor protein markers may be based on routine experiments to determine combinations that results in optimal sensitivity. In addition, or alternatively, assays for tumor proteins provided herein may be combined with assays for other known tumor antigens.

### Diagnositic Kits

[0290] The present invention further provides kits for use within any of the above diagnostic methods. Such kits typically comprise two or more components necessary for performing a diagnostic assay. Components may be compounds, reagents, containers and/or equipment. For example, one container within a kit may contain a monoclonal antibody or fragment thereof that specifically binds to an ovarian tumor protein. Such antibodies or fragments may be provided attached to a support material, as described above. One or more additional containers may enclose elements, such as reagents or buffers, to be used in the assay. Such kits may also, or alternatively, contain a detection reagent as described above that contains a reporter group suitable for direct or indirect detection of antibody binding.

[0291] Alternatively, a kit may be designed to detect the level of mRNA encoding an ovarian tumor protein in a biological sample. Such kits generally comprise at least one oligonucleotide probe or primer, as described above, that hybridizes to a polynucleotide encoding an ovarian tumor protein. Such an oligonucleotide may be used, for example, within a PCR or hybridization assay. Additional components that may be present within such kits include a second oligonucleotide and/or a diagnostic reagent or container to facilitate the detection of a polynucleotide encoding an ovarian tumor protein.

[0292] The following Examples are offered by way of illustration and not by way of limitation.

### EXAMPLE 1

### Identification of Ovarian Tumor Protein cDNAs

[0293] This Example illustrates the identification of cDNA molecules encoding ovarian tumor proteins.

[0294] The polymerase chain reaction (PCR)-Select™ cDNA subtraction methodology of Clontech (Palo Alto, Calif.) was utilized to create libraries enriched for cDNAs that encode ovary tissue-specific antigens, ovary metastatic tumor-expressed antigens and primary ovary tumor-expressed antigens. See U.S. Pat. Nos. 5,565,340 and 5,759,822, incorporated herein by reference, for a description of the (PCR)-Select™ cDNA subtraction methodology. This methodology permits the selective amplification of differentially expressed genes such as those expressed in one cell type but poorly expressed, or absent altogether, in another cell type.

[0295] PolyA mRNA was prepared from (a) a pool of four ovary omentum metastases and (b) four ovary primary tumors (including an endometroid adenocarcinoma, a germ cell tumor, a papillary serous adenocarcinoma and a clear cell carcinoma). The resulting transcripts were independently subtracted with a set of transcripts from normal brain, pancreas, bone marrow, lung, heart, kidney, liver, and trachea. Following mRNA isolation, cDNA was synthesized and hybridization and PCR amplification reactions were performed in accordance with Clontech's user manual with the following modifications: (1) cDNA was digested with a mixture of restriction enzymes including MscI, PvuII, StuI and DraI instead of the enzyme, RsaI, recommended by Clontech and (2) the ratio of driver to tester cDNA in the hybridization steps was increased to 1:76 in order to increase the stringency of the subtraction. While these are the tumor and normal cell types and (PCR)-Select™ cDNA subtraction reaction conditions used to achieve the polynucleotides disclosed herein, it will be apparent to one skilled in the art that each of these parameters may be modified as required for the particular application contemplated. Thus, for example, the artisan will recognize that the choice of restriction enzymes for cDNA digestion and the ratios of tester and driver for the hybridization steps may be varied in order to influence the efficiency and complexity of the resulting set of subtracted sequences.

[0296] Using the PCR-Select cDNA Subtraction methodology, three ovary tumor PCR-subtracted libraries were constructed by ligating cDNAs into the pCR2.1-TOPO plasmid vector (Invitrogen; Carlsbad, Calif.). One library was constructed using a pool of four ovary metastatic omentum “tester” mRNAs (OvMS Library; Ovarian Metastatic Subtraction Library) and two libraries were constructed using a pool of primary ovary tumor “tester” mRNAs, including an endometroid adenocarcinoma, a germ cell tumor, a papillary serous adenocarcioma, and a clear cell carcinoma (PrOvS Library; Primary Ovarian Tumor Subtraction Library). The PROvS1 and PROvS2 libraries were constructed from different PCR amplified pools from the same initial subtraction. Eight normal tissues were represented in the “driver” mRNA pool, including brain, pancreas, bone marrow, lung, heart, kidney, liver and trachea.

[0297] To analyze the efficiency of the subtraction, housekeeping genes such as actin and GAPDH were PCR amplified from dilutions of subtracted as well as unsubtracted PCR samples. The complexity and redundancy of each library was characterized by sequencing 96 clones from each of the PCR subtraction libraries (OvMS, PROvS1 and PROvS2). These analyses revealed that the libraries were enriched for genes overexpressed in ovary tissue and ovary tumor samples.

[0298] Individual library members were isolated and the cDNA inserts were amplified by PCR. The inserts were purified and subjected to automated sequencing. Disclosed herein in SEQ ID NOs:1-1412 and 1509-1730 are the sequences of 1,634 cDNA clones isolated from the ovarian PCR-subtracted libraries.

### EXAMPLE 2

### Synthesis of Ovarian Tumor Specific Polypeptides

[0299] This Example illustrates a methodology for the preparation of ovarian tumor specific polypeptides according to the present invention.

[0300] Polypeptides may be synthesized on a Perkin Elmer/Applied Biosystems Division 430A peptide synthesizer using FMOC chemistry with HPTU (O-Benzotriazole-N,N,N′,N′-tetramethyluronium hexafluorophosphate) activation. A Gly-Cys-Gly sequence may be attached to the amino terminus of the peptide to provide a method of conjugation, binding to an immobilized surface, or labeling of the peptide. Cleavage of the peptides from the solid support may be carried out using the following cleavage mixture: trifluoroacetic acid:ethanedithiol:thioanisole:water:phenol (40:1:2:2:3). After cleaving for 2 hours, the peptides may be precipitated in cold methyl-t-butyl-ether. The peptide pellets may then be dissolved in water containing 0.1% trifluoroacetic acid (TFA) and lyophilized prior to purification by C18 reverse phase HPLC. A gradient of 0%-60% acetonitrile (containing 0.1% TFA) in water (containing 0.1% TFA) may be used to elute the peptides. Following lyophilization of the pure fractions, the peptides may be characterized using electrospray or other types of mass spectrometry and by amino acid analysis.

### EXAMPLE 3

### Analysis of Ovarian Tumor cDNA Expression using Microarray Technology

[0301] This example describes microarray expression analysis of ovary tumor-and tissue-specific cDNAs.

[0302] Sequences disclosed herein were found to be overexpressed in specific tumor tissues as determined by microarray analysis. Using this approach, cDNA sequences are PCR amplified and their mRNA expression profiles in tumor and normal tissues are examined using cDNA microarray technology essentially as described (Schena, M. et al., 1995 Science 270:467-70). In brief, the clones are arrayed onto glass slides as multiple replicas, with each location corresponding to a unique cDNA clone (as many as 5500 clones can be arrayed on a single slide, or chip). Each chip is hybridized with a pair of cDNA probes that are fluorescence-labeled with Cy3 and Cy5, respectively. Typically, 1 μg of polyA⁺ RNA is used to generate each cDNA probe. After hybridization, the chips are scanned and the fluorescence intensity recorded for both Cy3 and Cy5 channels. There are multiple built-in quality control steps. First, the probe quality is generally monitored using a panel of ubiquitously expressed genes. Secondly, the control plate also can include yeast DNA fragments of which complementary RNA may be spiked into the probe synthesis for measuring the quality of the probe and the sensitivity of the analysis. Currently, the technology offers a sensitivity of about 1 in 100,000 copies of mRNA. Finally, the reproducibility of this technology can be ensured by including duplicated control cDNA elements at different locations.

[0303] The clones described herein were randomly picked from an ovarian metastatic PCR subtracted library (OvMS library; also called OPs library) and a primary ovarian tumor PCR-subtraction library (PrOvS library; also called OTs library) described in Example 1. A total of 2016 clones (1056 from OPs and 960 from OTs) were arrayed. cDNA inserts for arraying were amplified by PCR using vector specific primers. The resulting PCR products were sequenced in one direction and the trimmed sequences disclosed in Example 1 (SEQ ID NO:1-1412 and 1509-1730). The arrays were probed with 35 probe pairs (normal tissues and ovary tumor and normal-specific probes). Analysis consists of determining the ratio of the mean or median hybridization signal for a particular element (cDNA) using two sets of probes. The ratio is a reflection of the over- or under-expression of the element (cDNA) within the probe population. Probe groups were set up to identify elements (cDNAs) with high differential expression in probe group #1: Analysis #1 compared ovary tumor (probe group #1) and non-ovary normal tissue (probe group #2); Analysis #2 compared normal and tumor ovary (probe group #1) and normal essential tissues (probe group #2); Analysis #3 used the same probe groups as analysis #2 with the addition of probe pairs that had to be repeated due to initial failure. A threshold (fold-overexpression in probe group #1) was set at 3.0 (analysis #1) or 2.5 (analysis #2 and #3). This threshold was set based on experience to identify elements with overexpression that could be reproducibly detected. Elements identified by these analyses are shown in Tables 2-4. Elements within each analysis were ranked on mean signal 2 and mean signal 1: Mean Signal 2<0.1 identifies elements with potentially very low background; Mean Signal 2 0.1-0.2 identifies elements with potentially some background; Mean signal 2>2.0 identifies elements with potentially higher background. Tabulation of analysis #2 only shows elements that are not identified in analysis #1. Analysis #3 only shows elements that are not identified by either analysis #1 or #2. The elements identified were compared to sequences in publically available databases. Those sequences showing some degree of similarity are detailed in Tables 2-4. Sequences of elements identified by this analysis are disclosed in SEQ ID NO:1413-1508.

TABLE 3
Analysis #1: High Defferential Expression in Group 1
Ovary Tumor cy3> Normal Tissue cy5
Threshold: 3

| | | Prior | | | | |
|---|---|---|---|---|---|---|
| SEQ | Clone | Related | | Mean | Mean | |
| ID NO | Identifier # | SEQ ID NO: | Ratio | Signal 1 | Signal 2 | EST/GenBank Annotation |
| 1413 | 33482 | 965 | 4.34 | 0.366 | 0.084 | Novel = O772P |
| 1414 | 33380 | 1025 | 3.54 | 0.315 | 0.089 | Novel = O772P |
| 1415 | 33498 | 977 | 3.31 | 0.313 | 0.095 | Novel = O772P |
| 807 | 33161 | 807 | 3.63 | 0.273 | 0.075 | Retinoic acid-binding protein II |
| | | | | | | (CRABP-II) |
| 1416 | 33855 | 1354 | 3.04 | 0.27 | 0.089 | Glucose regulated protein, GRP78 |
| 1417 | 33872 | 1368 | 4.83 | 0.241 | 0.05 | Novel = O772P |
| 1418 | 34863 | 558 | 4.01 | 0.226 | 0.056 | Wnt inhibitory factor-1 (WIF-1) |
| 1419 | 34558 | 297 | 3.09 | 0.224 | 0.073 | Zinc finger protein HZF1. Genomic |
| | | | | | | clone, chromosome 19 |
| 1420 | 34582 | 315 | 3.52 | 0.217 | 0.062 | TAR RNA loop binding protein |
| | | | | | | (TRP-185) |
| 43 | 34409 | 43 | 3.25 | 0.204 | 0.063 | Fibroblast growth factor inducible |
| | | | | | | gene 14 (FIN14) |
| 1421 | 34598 | 250 | 3.01 | 0.198 | 0.066 | Genomic clone, chromosome |
| | | | | | | 20p11.21-11.23 = O8E |
| 1422 | 34517 | 358 | 7.11 | 0.169 | 0.024 | Mitotic checkpoint kinase Bub1 |
| | | | | | | (BUB1) |
| 1423 | 34093 | 172 | 3.37 | 0.165 | 0.049 | Novel |
| 1424 | 33345 | 1005 | 4.06 | 0.775 | 0.191 | cDNA clone, KIAA0762 |
| 1425 | 34445 | 70 | 3.58 | 0.709 | 0.198 | Ribophorin I |
| 382 | 34008 | 382 | 5 | 0.681 | 0.136 | Genomic clone, chromosome 20 |
| 1426 | 34946 | 889 | 3.59 | 0.678 | 0.189 | Wnt inhibitory factor-1 (WIF-1) |
| 1427 | 34751 | 532 | 4.74 | 0.608 | 0.128 | Putative Integral membrane |
| | | | | | | transporter protein (LC27) |
| 1428 | 33813 | 1263 | 4.69 | 0.592 | 0.126 | Ribosomal protein L3 |
| 1429 | 34122 | 192 | 4.73 | 0.587 | 0.124 | Ribophorin I |
| 1430 | 34162 | 397 | 3.18 | 0.466 | 0.147 | Keratin 19 |
| 1431 | 33858 | 1356 | 3.08 | 0.379 | 0.123 | Fibrillarin (Hfib1), casein kinase II |
| | | | | | | beta subunit |
| 1432 | 34861 | 556 | 3.14 | 0.363 | 0.116 | Keratin 19 |
| 1433 | 34237 | 142 | 4.08 | 13.106 | 3.211 | |
| 1434 | 34496 | 341 | 4.23 | 5.957 | 1.408 | |
| 1435 | 33673 | | 4.22 | 6.908 | 1.638 | Elongation factor 1-alpha (EF-1) |
| 1436 | 34058 | | 3.31 | 5.396 | 1.629 | Elongation factor 1-alpha 1 |
| 1437 | 34143 | 208 | 3.5 | 3.477 | 0.995 | GAPDH |
| 1438 | 33603 | 1145 | 3.39 | 1.861 | 0.548 | Ribosomal Protein S3 |
| 1439 | 33742 | 1206 | 3.74 | 1.644 | 0.439 | Ribosomal protein S3 |
| 1440 | 33555 | 1058 | 3.81 | 1.581 | 0.415 | Collagen alpha-2 type 1 (COL1A2) |
| 1441 | 33656 | 1091 | 5.13 | 1.569 | 0.306 | Collagen alpha-1 type 1 (COL1A1) |
| 1442 | 33562 | 1064 | 3.19 | 1.536 | 0.481 | Collagen alpha-2 type 1 (COL1A2) |
| 1443 | 34501 | 346 | 3.61 | 1.456 | 0.403 | hnRNP A1 |
| 1444 | 33302 | 771 | 3.33 | 1.454 | 0.437 | Ribosomal Protein S3 |
| 1445 | 34276 | 513 | 3.35 | 1.429 | 0.427 | eIF-4AII |
| 1446 | 33967 | 1394 | 3.96 | 1.369 | 0.346 | Fibronectin |
| 1447 | 33220 | 710 | 3.97 | 1.326 | 0.334 | Collagen alpha-1 type 1 (COL1A1) |
| 1448 | 34006 | 381 | 3.26 | 1.284 | 0.394 | Carcinoma associated antigen |
| | | | | | | GA733-2/KSA |
| 1449 | 34088 | 169 | 4.89 | 1.277 | 0.261 | Putative integral membrane |
| | | | | | | transporter protein (LC27) |
| 1450 | 33720 | 1186 | 3.87 | 1.277 | 0.33 | Collagen alpha-1 type I(COL1A1) |
| 1451 | 34801 | 472 | 4.3 | 1.267 | 0.295 | eIF-4A |
| 1452 | 33033 | 619 | 4.71 | 1.174 | 0.249 | Keratin 8 |
| 1453 | 34310 | 21 | 3.02 | 1.114 | 0.369 | Genomic clone, BAC from 7p15 |
| 1454 | 33592 | 1136 | 3.53 | 1.004 | 0.285 | Collagen alpha-1 type III (COL3A1) |
| 632 | 33055 | 632 | 4.31 | 0.955 | 0.222 | cDNA clone DKFZp564N1116 |
| 1455 | 34279 | 2 | 3.78 | 0.939 | 0.248 | hnRNP A1 |
| 1456 | 34541 | 287 | 3.65 | 0.937 | 0.257 | hnRNP A1 |
| 1457 | 34380 | 235 | 3.66 | 0.867 | 0.237 | eIF-4AI |
| 1458 | 34675 | 433 | 3.63 | 0.775 | 0.214 | Ribosomal protein L5 |
| 1459 | 33291 | 762 | 3.14 | 0.698 | 0.222 | Collagen alpha-1 type III (COL3A1) |
| 1460 | 34694 | 448 | 3.2 | 0.679 | 0.212 | Genomic clone, Xq13; X |
| | | | | | | inactivation transcript (XIST) |

[0304] TABLE 3
Analysis #2: High Differential Expression in Group 1
Normal and Tumor Ovary > Normal Essential Tissues
Threshold: 2.5

| | | Prior | | | | |
|---|---|---|---|---|---|---|
| SEQ | Clone | Related | | Mean | Mean | |
| ID NO | Identifier # | SEQ ID NO: | Ratio | Signal 1 | Signal 2 | EST/GenBank Annotation |
| 1461 | 33660 | 1094 | 5.05 | 0.491 | 0.097 | 1-218 is novel; 218-305 is vector? |
| 1462 | 33277 | 750 | 2.93 | 0.284 | 0.097 | Partial unknown mRNA from drug- |
| | | | | | | resistant melanoma cells |
| 1463 | 33376 | 1023 | 3.19 | 0.253 | 0.079 | Novel = 0772P |
| 1464 | 33462 | 947 | 2.7 | 0.238 | 0.088 | Novel = 0772P |
| 1465 | 32951 | 654 | 2.78 | 0.234 | 0.084 | Keratin 19 |
| 1466 | 34405 | | 2.63 | 0.232 | 0.088 | c-kit proto-oncogene (stem cell |
| | | | | | | growth factor receptor) |
| 1467 | 34305 | 17 | 2.57 | 0.217 | 0.085 | Wnt inhibitory factor-1 (WIF-1) |
| 1468 | 33508 | 983 | 2.68 | 0.203 | 0.076 | Insulin-like growth factor II (IGF-2) |
| | | | | | | exon 7 with additional ORF |
| 1212 | 33750 | 1212 | 2.68 | 0.187 | 0.07 | DEK putative oncogene (leukemia); |
| | | | | | | 1-387 bp; 387 += vector |
| 1469 | 34873 | 563 | 3.02 | 0.165 | 0.055 | Apurinic/apyrimidinic endonuclease |
| | | | | | | (HAP1); REDOX factor |
| 1377 | 33885 | 1377 | 2.83 | 0.143 | 0.051 | Genomic clones, HLA class I |
| | | | | | | region?Bases after 101 are vector? |
| 1470 | 34542 | 288 | 2.62 | 0.125 | 0.048 | Estrogen receptor (ESR1) |
| 1471 | 33644 | 1081 | 3.01 | 0.557 | 0.185 | Novel = 0772P |
| 1472 | 34344 | 215 | 2.62 | 0.505 | 0.193 | HER2/c-erb-B-2 (tyrosine kinase |
| | | | | | | receptor) = Her 2 neu |
| 1473 | 33414 | 911 | 2.66 | 0.494 | 0.186 | Collagen alpha-2 type I (COL!A2) |
| 1474 | 34298 | 12 | 2.78 | 0.488 | 0.175 | Keratin 19 |
| 1475 | 33624 | 1159 | 2.72 | 0.442 | 0.163 | Jerky (mouse) homolog-like |
| | | | | | | (JRKL); nucl. reg., role in epilepsy? |
| 1476 | 34047 | 103 | 3.38 | 0.406 | 0.12 | Fibroblast growth factor inducible |
| | | | | | | gene 14 (FIN14) |
| 1477 | 33173 | 817 | 2.84 | 0.343 | 0.121 | Fibronectin (FN1) |
| 1478 | 34607 | 253 | 2.59 | 0.34 | 0.131 | HER2/c-erb-B-2 (tyrosine kinase |
| | | | | | | receptor) = Her 2 neu |
| 1479 | 33404 | 903 | 2.65 | 0.32 | 0.121 | Novel = 0772P |
| 1480 | 33069 | 836 | 2.8 | 7.953 | 2.841 | |
| 1481 | 33847 | 1346 | 3.42 | 2.541 | 0.743 | |
| 1482 | 34527 | 366 | 2.51 | 2.089 | 0.833 | |
| 1483 | 33427 | 922 | 2.68 | 1.999 | 0.746 | |
| 1484 | 33035 | 621 | 3.31 | 1.799 | 0.543 | |
| 1485 | 34079 | 122 | 2.57 | 1.562 | 0.608 | |
| 1486 | 33680 | 1108 | 2.53 | 1.477 | 0.584 | |
| 1487 | 33463 | 948 | 2.87 | 1.207 | 0.42 | |
| 1488 | 33207 | 701 | 2.87 | 1.053 | 0.367 | |
| 1489 | 34256 | 152 | 2.63 | 0.911 | 0.347 | |
| 1490 | 33581 | 1127 | 2.81 | 0.86 | 0.306 | |
| 1491 | 33634 | 1165 | 2.71 | 0.794 | 0.293 | |
| 1492 | 34539 | 285 | 2.85 | 0.637 | 0.224 | |
| 1493 | 32961 | 662 | 2.98 | 0.626 | 0.21 | |
| 1494 | 33790 | 1245 | 2.58 | 0.621 | 0.24 | |
| 1495 | 33284 | 756 | 2.58 | 0.617 | 0.239 | |
| 1496 | 33183 | 825 | 2.64 | 0.589 | 0.223 | |
| 1497 | 33388 | 894 | 2.5 | 0.557 | 0.223 | |

[0305] TABLE 4
Analysis #3: High Differential Expression in Group 1
N and T Ovary (re-probe) > Normal Essential Tissues (re-probe)
Threshold: 2.5

| SEQ | Clone | | Mean | Mean | |
|---|---|---|---|---|---|
| ID | Identi- | | Sig- | Sig- | |
| NO | fier # | Ratio | nal 1 | nal 2 | EST/GenBank Annotation |
| 1498 | 33090 | 2.53 | 0.247 | 0.098 | Genomic clone, chromosome |
| | | | | | 20p12.3-13 |
| 1499 | 33239 | 2.73 | 0.52 | 0.191 | Genomic clone, chromosome 6; |
| | | | | | (breast cancer antigen discovery) |
| 886 | 34943 | 2.52 | 0.317 | 0.126 | Wnt inhibitory factor-1 (WIF-1) |
| 1500 | 33654 | 2.51 | 6.272 | 2.499 | Collagen alpha-1 type 1 (COL1A1) |
| 1501 | 33999 | 2.52 | 2.285 | 0.908 | Thymosin beta-4; interferon- |
| | | | | | inducible |

[0306] Based on the microarray profile and database search results, several cDNAs identified above were further analyzed by Real Time PCR. Clone O990P (SEQ ID NO:1502; Clone Identifier #:33055/61229) showed overexpression in most tumors and some expression in bone marrow and brain. Clone 0989P (SEQ ID NO:1506; Clone Identifier #33161/59657) was overexpressed in most tumors (n=13) and showed some expression in normal breast, ureter, and oesophagus.

### EXAMPLE 4

### Characterization of Ovarian Tumor Clone O990P

[0307] Clone 0990P (originally disclosed as clone number 33055, SEQ ID NO:632) was identified using the subtractive cDNA library as described in Example 1. Both microarray and Real time PCR analysis revealed that this sequence was over-expressed in ovarian tumors compared to normal ovarian tissue.

[0308] To further characterize the O990P specific sequence (the cDNA sequence of which is disclosed in SEQ ID NO:173 1) it was subjected to bioinformatic searches in a number of publicly available databases. These searches reveled that the 5′-end showed significant identity to a region of an unannotated cDNA clone in GenBank, accession number KIAA0709 in addition to sequence from chromosome 17. The sequence of clone KIAA0709 is disclosed in SEQ ID NO:1733. The 3′-end of clone O990P was found to show significant identity to a region of another unannotated cDNA clone from GenBank, accession number A10492276 in addition to sequence from chromosome 5. The sequence of clone A10492276 (DKFZp564N1116) is disclosed in SEQ ID NO:1735. Thus, O990P may represent a gene transcribed from a genomic translocation that may be specific for ovarian tumors. The contig sequence corresponding to these sequences is disclosed in SEQ ID NO: 1732.

[0309] Clone KIAA0709 was found to be highly homologous to a template derived from LifeSeq Gold database, template number 441206.15, the sequence of which is disclosed in SEQ ID NO:1734. This sequence enabled the 5′-end of KIAA0709 to be extended by 8 nucleotides and the 3′-end to be extended by 60 nucleotides. Clone DKFZp564N1116 was found to be highly homologous to a second template derived from the LifeSeq gold database, template number 049104.1 (disclosed in SEQ ID NO:1736). This sequence allowed the 3′-end of DKFZp564N1116 to be extended by 464 bp. Based on the sequence information described above, a full length consensus sequence for O990P was derived, the sequence of which is disclosed in SEQ ID NO:1737.

[0310] Clone DKFZp564N1116, extended at its 3′-end with LifeSeq template number 0419104.1, contained no open reading frame that would encode a protein of at least 75 amino acids. However, clone KIAA0709 contained an open reading frame encoding a protein 1479 amino acids in length, the sequence of which is disclosed in SEQ ID NO:1738. Similarly, LifeSeq clone number 441206.15 also contained an open reading frame encoding 1497 amino acids, the sequence of which is disclosed in SEQ ID NO:1739. SEQ ID NO:1739 was found to differ at position 44 (Val to Ile) when compared to SEQ ID NO:1738 due to a difference in the nucleotide sequence.

[0311] Using transmembrane prediction analysis, the proteins encoded by KIAA0709 and 441206.15 were both shown to contain potential transmembrane domains, a fact which is supported in the literature by Shelkh et al., 2000 (J. Cell Science. 113:1021-1032).

[0312] From the foregoing it will be appreciated that, although specific embodiments of the invention have been described herein for purposes of illustration, various modifications may be made without deviating from the spirit and scope of the invention. Accordingly, the invention is not limited except as by the appended claims.

What is claimed:

1. An isolated polynucleotide comprising a sequence selected from the group consisting of:
(a) sequences provided in SEQ ID NO:1731-1737;
(b) complements of the sequences provided in SEQ ID NO: 1731-1737;
(c) sequences consisting of at least 20 contiguous residues of a sequence provided in SEQ ID NO: 1731-1737;
(d) sequences that hybridize to a sequence provided in SEQ ID NO: 1731-1737, under moderately stringent conditions;
(e) sequences having at least 75% identity to a sequence of SEQ ID NO: 1731-1737;
(f) sequences having at least 90% identity to a sequence of SEQ ID NO: 1731-1737; and
(g) degenerate variants of a sequence provided in SEQ ID NO: 1731-1737.

2. An isolated polypeptide comprising an amino acid sequence selected from the group consisting of:
(a) sequences provided in SEQ ID NOs:1738-1739;
(b) sequences encoded by a polynucleotide of claim 1; and
(c) sequences having at least 70% identity to a sequence encoded by a polynucleotide of claim 1; and
(d) sequences having at least 90% identity to a sequence encoded by a polynucleotide of claim 1.

3. An expression vector comprising a polynucleotide of claim 1 operably linked to an expression control sequence.

4. A host cell transformed or transfected with an expression vector according to claim 3.

5. An isolated antibody, or antigen-binding fragment thereof, that specifically binds to a polypeptide of claim 2.

6. A method for detecting the presence of a cancer in a patient, comprising the steps of:
(a) obtaining a biological sample from the patient;
(b) contacting the biological sample with a binding agent that binds to a polypeptide of claim 2;
(c) detecting in the sample an amount of polypeptide that binds to the binding agent; and
(d) comparing the amount of polypeptide to a predetermined cut-off value and therefrom determining the presence of a cancer in the patient.

7. A fusion protein comprising at least one polypeptide according to claim 2.

8. An oligonucleotide that hybridizes to a sequence recited in SEQ ID NO: 1731-1737 under moderately stringent conditions.

9. A method for stimulating and/or expanding T cells specific for a tumor protein, comprising contacting T cells with at least one component selected from the group consisting of:
(a) polypeptides according to claim 2;
(b) polynucleotides according to claim 1; and
(c) antigen-presenting cells that express a polynucleotide according to claim 1, under conditions and for a time sufficient to permit the stimulation and/or expansion of T cells.

10. An isolated T cell population, comprising T cells prepared according to the method of claim 9.

11. A composition comprising a first component selected from the group consisting of physiologically acceptable carriers and immunostimulants, and a second component selected from the group consisting of:
(a) polypeptides according to claim 2;
(b) polynucleotides according to claim 1;
(c) antibodies according to claim 5;
(d) fusion proteins according to claim 7;
(e) T cell populations according to claim 10; and
(f) antigen presenting cells that express a polypeptide according to claim 2.

12. A method for stimulating an immune response in a patient, comprising administering to the patient a composition of claim 11.

13. A method for the treatment of a cancer in a patient, comprising administering to the patient a composition of claim 11.

14. A method for determining the presence of a cancer in a patient, comprising the steps of:
(a) obtaining a biological sample from the patient;
(b) contacting the biological sample with an oligonucleotide according to claim 8;
(c) detecting in the sample an amount of a polynucleotide that hybridizes to the oligonucleotide; and
(d) compare the amount of polynucleotide that hybridizes to the oligonucleotide to a predetermined cut-off value, and therefrom determining the presence of the cancer in the patient.

15. A diagnostic kit comprising at least one oligonucleotide according to claim 8.

16. A diagnostic kit comprising at least one antibody according to claim 5 and a detection reagent, wherein the detection reagent comprises a reporter group.

17. A method for inhibiting the development of a cancer in a patient, comprising the steps of:
(a) incubating CD4⁺ and/or CD8⁺ T cells isolated from a patient with at least one component selected from the group consisting of: (i) polypeptides according to claim 2; (ii) polynucleotides according to claim 1; and (iii) antigen presenting cells that express a polypeptide of claim 2, such that T cell proliferate;
(b) administering to the patient an effective amount of the proliferated T cells, and thereby inhibiting the development of a cancer in the patient.

The application's sequence listing, which the Patent Office published only in electronic form, follows.

SEQUENCE LISTING (1739 sequences)

SEQ ID NO: 1 - DNA, 264 bp, Homo sapiens
ctggtatcacactctacccaagtcccaaaagcaggttcacataactcctgtcttcattatctgatatccgggactttttccctttcaccttccattataggatgatgcagcaagaaggccctcaccagataccagtcctttgatcttggactacccaggcttcagaactataagaaataaatctccgttctttgaggattacccagtttgtgctattctgttatggcagcacaaaatggactaagacataggtccaatctaagg

SEQ ID NO: 2 - DNA, 550 bp, Homo sapiens
  misc_feature 9, 10, 494, 534: n = A,T,C or G
ctgaggaanntcttcattggagggttgagctttgaaacaactgatgagagcctgaggagccattttgagcaatggggaacgctcacggactgtgtggtaatgagagatccaaacaccaagcgctccaggggctttgggtttgtcacatatgccactgtggaggaggtggatgcagctatgaatgcaaggccacacaaggtggatggaagagttgtggaaccaaagagagctgtctccagagaagattctcaaagaccaggtgcccacttaactgtgaaaaagatatttgttggtggcattaaagaagacactgaagaacatcacctaagagattattttgaacagtatggaaaaattgaagtgattgaaatcatgactgaccgaagcagtggcaagaaaaggggctttgcctttgtaacctttgacgaccatgactccgtggataagattgtcattcagaaatccattcctgtgaatggacctgcccggccggncaagggcgaaattcaacacactttggcggcgttacctaanggatcccaacttcggt

SEQ ID NO: 3 - DNA, 434 bp, Homo sapiens
aaatttatgaaactttcgaacagtagcaactgaaatttgtcacttttctgttacgcagagaatcagaccttttgataatatttgggagggtaaaagaaatatgccaaatatgaaacctttttgtcagcactacatacatcttttttttgcggggggcgggggggacagagtctcactgtgtcactcagactggagtacagtgatgcgatctcggctcactgcaacctccgcctcctgggttcaagcgattctcctgcttcagcctcctgagtagctgggattacaggtgcacaccaccacgcccggctaatttttgtatttttagtagagatggggtttcaccatgttggtcaggctggtcttgaactcctgacctcgttcctgccttagcctcctaaagtgccgggattacaggcgtgaaccaccgcacctgg

SEQ ID NO: 4 - DNA, 381 bp, Homo sapiens
aaaagaaaagacacctgggcctgggggaccactaccaccaagacgcggagaccagtagtggccccaaatgccaggctgcactgatatttattggatataagacaaaggggcagggtaaggaatgtgaaccatctccaataataggtaaggtcacatgggtcatgtgtccactggacagggggcccttccctgcctggcagcagaggcagagagagagagaagagagagagacagcttatgccattatttctgcatatcagacatttagtactttcactaatttgctcctgctatctaaaaggcagagccaggtatacaggatggaacatgaaagcggactaggagcgtgaccactgaagcacagcatcacagggagacagg

SEQ ID NO: 5 - DNA, 422 bp, Homo sapiens
aaatggttacattgtaaactgttatataagtacctgataatatcattaattttgtttcttggcctgccatgcttaaaatattaactctctggccctttaagaaaaaaacgtgctgacccctgctctagatcaaagaaaacaaacctcaaaaatactttcctccctctaccccacttgacccttgtcccggggcagtaggcatctccgtcaaaactcttgtccctggtctgtggtaactttctcagctccccaacccatgtccctcaaagtcccctccctatagggcaagaacccagcaacttcgctctgccccgactctaggcgggatgtagctcattttgggatacgagtctccatcgtggagcctggcttcttccgaacccctgtgaccaacctggagagtctggagaaaaccctgcagg

SEQ ID NO: 6 - DNA, 261 bp, Homo sapiens
  misc_feature 148, 180: n = A,T,C or G
ctgtccagtgacatctagggaagcccagcccccagcagcagcaggaactcttggggacagtctgtcttgttgcaaagccagcacagcaagcagcctccgcattagttccatagcttgactggcttctaagatgggcattgtcaagatncagaaatctcaaagcatcccctctttgggctncatcatccaagggtgagaaacagcagagcctaagtgagaagtctgagtcaacaccttggctcagttttcaaaatgaatttt

SEQ ID NO: 7 - DNA, 428 bp, Homo sapiens
ctcacgttgatgtcaagactaccgatggttacttgcttcgtctgttctgtgttggttttactaaaaaacgcaacaatcagatacggaagacctcttatgctcagcaccaacaggtccgccaaatccggaagaaagatgatggaaatcatgacccgagaggtgcagacaaatgacttgaaagaagtggtcaataaattgattccagacagcattggaaaagacatagaaaaggcttgccaatctatttatcctctccatgatgtcttcgttagaaaagtaaaaatgctgaagaagcccaagtttgaattgggaaagctcatggagcttcatggtgaaggcagtagttctggaaaagccactggggacgagacaggtgctaaagttgaacgagctgatggatatgaaccaccagtccaagaaatctgttt

SEQ ID NO: 8 - DNA, 305 bp, Homo sapiens
cctggccgtgttggccgcctttctggaggagggcccggaagaaaacagtgcctatgagcagttgctgtctcgcttggaagaaatcgctgaggaaggctcagagactcaggtcccaggactggacatatcttgcactcctgccctctgacttcagccgctacttccaatatgaggggtctctgactacaccgccctgtgcccagggtgtcatctggactgtgtttaaccagacagtgatgctgagtgctaagcagctccacaccctctctgacaccctgtggggacctggtgactctcggctacag

SEQ ID NO: 9 - DNA, 344 bp, Homo sapiens
aaatgacgaaactcagcggaaatatattcagggattgaagaggttaatgaccatttgccagaaacactttcctacagacccatccaaatgtgtggagtacaatgcactgtgagatctgtgtatggtgtgttaataacaataagaaacttagggaagcaggctgtggacttctggaattaccaacaggaatgaggaaagaagaaaactggagtttccagtctctgagttctacctgatgtaactcttgattggttttaagaactttgttggccttcatttcatatctgactgcaagctgatttttctttcttgctttcattttaattagtccaaaattaagtttt

SEQ ID NO: 10 - DNA, 377 bp, Homo sapiens
aaaacctttagcatttctgcctataatatttgggttttcttcttttcctatctttatttgataagtcccatcaaatattttccccataatcacaatgttttcttttcactttgctcaagaactgagttatgagctccaaaatttggacaaactctacattggctaagttttagtcatttgcactgctaagaaagatgacaattcagcatgctgaagatgacttcctcccttataaaggggctaacacagagggcaatactgttcatgcttctgattcttgatcacaagaattgctttaggcaattacaatcatgtctcctctgacacatcatattattcaagtgagacagagaaagaagatgtcctatgtcacacag

SEQ ID NO: 11 - DNA, 381 bp, Homo sapiens; identical to SEQ ID NO: 4

SEQ ID NO: 12 - DNA, 219 bp, Homo sapiens
cctgaaggaagagctggcctacctgaagaagaaccatgaggaggaaatcagtacgctgaggggccaagtgggaggccgggtcagtgtggaggtggattccgctccgggcaccgatctcgccaagatcctgagtggcatgcgaagccaatatgaggtcatggccgagcagaaccggaaggatgctgaagcctggttcaccagccggactgaagaattgaa

SEQ ID NO: 13 - DNA, 355 bp, Homo sapiens
  misc_feature 344, 348: n = A,T,C or G
aaataatccaggcaggagaagagaggagggcacacttggaactcccctccccacaatacgtgattatttacattttagtaattggacaatcccggctcaggaggaggttgcaagaatctgcaaaagttggagggagcgccccaggagaacaaacagcaagccttatttcccctagcccatcccccaaaaaaccatccatcccatcctagtgtctggtggtgtccggtggtgtccatcttccattccttcccaaattatggaagtaaggttcttctcaccagaataagagcacttgggataacagagtagggtcccctcacccaaaaaaaaaaaaaaaaaaaaancttnggggaaa

SEQ ID NO: 14 - DNA, 658 bp, Homo sapiens
  misc_feature 467, 527, 550, 579, 583, 600, 608, 616, 623, 625, 640, 655: n = A,T,C or G
gaaaagttcccattcaggtgtcttggaaattgaaaattcagtagatgatctgagtagcagaatggacatacttgaagaaagaatagacagtctagaagatcaaattgaagaattctctaaggatacaatgcaaatgaccaaacagataattagtaaagaaaggcaaagagatatagaggagagatctagaagttgcaacattcgtttgataggaattccagaaaaggagagttatgagaatagggcagaggacataattaaagaaataattgatgaaaactttgcagaactaaagaaaggttcaagtcttgagattgtcagtgcttgtcgagtacctagtaaaattgatgaaaagagactgactcctagacacatcttggtgaaattttggaattctagtgataaagagaaaataataagggcttctagagagagaagagaaattacctaccaaggaacaagaatcnggttgacagcagacttatcctggacacactggatgctagaagtaaatgggagccaatgtnttcaaaggtcttgcttggaaaanggcttttaatcctagaatcttttttccanccanattgccttttgatttanggggtaanccaaaggnttttttntnttgaagaatttagcngatttgtttgcattngcc

SEQ ID NO: 15 - DNA, 713 bp, Homo sapiens
  misc_feature 505, 521, 546, 560, 563, 575, 594, 596, 626, 639, 689, 691: n = A,T,C or G
ctgcaattacatcattttttatctatcttctgcttttactttgtgtagggtagggatggggacttacaaatgggccaaagacacttcaacctcaaaaccaaagagaaatctctgcttgcagagatacaaagaaagtaactctccctcttatgaaaagcaaccaggaactctactccagttatgagggccactgatggtgtgggagagctatcaagaagattcttcctagacgtggtgcaaagacagtgagaacccaggaaatcacattcatgggacacttgctcttaccgtcatcaccctctattctatctcaactttggccccatcaaatctaatgataaacaaaagaaggtaattacatgtagaaaatcaaagtgaatgggaatgtggtggtgtgaacataaaagaagaaattgaaaacaatcaaaagtttctcagtgctgctttcccgcactgtcatagaaatctctgatccaattcttcatatgtctaacttccaaggaancgggctaacagcacanacataggatccaaggcattcttggngcggaaaattaagnggngggccccctttngaatggggactgcaaccananggctgggaaatccttatactcccctcccgnccggggctaattnccattggtgaaacaatgttgggggggaaaaaaggttttgctcctacctanangaaccagagggcttgttccccc

SEQ ID NO: 16 - DNA, 616 bp, Homo sapiens
  misc_feature 539, 551, 560, 563, 593, 601: n = A,T,C or G
ttcaaagaatcacttttaggcttacaaaaataaatatttgtcaaaatgttcaataaatattacataaaactagcagcaaaaagtatctagaaatctgtcgtgtgcaaatagttttcttcccaactatcattcccatggtcccaaataaattttagaatctagtcccatccccttcctagacaagctgcgttcaacaatctccaagagacaaagtaagattggaagtttaaggacacgcacacaagacatatatataaaattctctgaatgtgcaataaaagaagtactttgtaaaaagttatgggcaaaatgtacaagggcctaaacctagactaattgaaatagcaccataacaaatgacctcaatactgtcaagtgcacctacttaataaaagttttagaacaaggcacaatacacttgaaaatctattgcactttaggaaatttttgccgtcttcctatgccactgtaaaaagatggagcgttttgatcaccgcattctggacctcgggccgcgacccacgctaagggcgaaattncagcaccccttngcgggccgnttnctagtgggatcccaactcggtacccaaacnttggcgtnaatcatgggccatta

SEQ ID NO: 17 - DNA, 733 bp, Homo sapiens
  misc_feature 546, 633, 642, 654, 656, 664, 699, 704, 708, 719, 723, 729,733: n = A,T,C or G
ttcaaagcctgtctgcgagcctggctgtggtgcacatggaacctgccatgaacccaacaaatgccaatgtcaagaaggttggcatggaagacactgcaataaaaggtacgaagccagcctcatacatgccctgaggccagcaggcgcccagctcaggcagcacacgccttcacttaaaaaggccgaggagcggcgggatccacctgaatccaattacatctggtgaactccgacatctgaaacgttttaagttacaccaagttcatagcctttgttaacctttcatgtgttgaatgttcaaataatgttcattacacttaagaatactggcctgaattttattagcttcattataaatcactgagctgatatttactcttccttttaagttttctaagtacgtctgtagcatgatggtatagattttcttgtttcagtgctttgggacagattttatattatgtcaattggatcagggtaaaattttcagtgtgtagttggcagatattttcaaaattacaatgcatttatggtgtctgggggcanggggaacatcagaaaggttaaattggggcaaaaatggcgtaagtcacaaaaaattggaatggtgcaagttaattgttgaaagtacancaatttcanatttattggcananatttagangttggttacatttttacttggccggaacacctaanggcgnaatncacacactggnggcngtatangggn

SEQ ID NO: 18 - DNA, 148 bp, Homo sapiens
ggcaggtaaagtaagtcgtttccttttatttgaacacctaggggccattttagagttataattagcccaatttctatatcattttgtctcagggaatagaagcgtgagggagggagagagttgggggaatggctggttggtagagtgg

SEQ ID NO: 19 - DNA, 130 bp, Homo sapiens
aaaagacctcaagaaagcaacgaaaggaacgcaagaacagaatgaagaaagtcagggggactgcaaaggccaatgttggtgctggcaaaaagccgaaggagtaaaggtgctgcaatgatgttagctgtgg

SEQ ID NO: 20 - DNA, 341 bp, Homo sapiens
ctgcccaagggcgttcgtaacgggaatgccgaagcgtgggaaaaagggagcggtggcggaagacggggatgagctcaggacagagccagaggccaagaagagtaagacggccgcaaagaaaaatgacaaagaggcagcaggagagggcccagccctgtatgaggaccccccagatcagaaaacctcacccagtggcaaacctgccacactcaagatctgctcttggaatgtggatgggcttcgagcctggattaagaagaaaggattagattgggtaaaggaagaagccccagatatactgtgccttcaagagaccaaatgttcagagaacaaactaccag

SEQ ID NO: 21 - DNA, 698 bp, Homo sapiens
  misc_feature 422, 470, 495, 504, 515, 520, 521, 567, 568, 578, 613, 619,622, 626, 633, 638, 640, 655, 659, 664, 671, 683, 685: n = A,T,C or G
ctgttgaaatgaagcactttacagtctttgtggcagcagaatatacttgtccatggttcatatcaatgctaaaattccggcagggaaaaaaatgatatgttaagcacccaaatcttcacatggagggggagggggtggggaaaagaaggaaaaaaagggaaaaacaaccaaaataatttaagtaaatgacagattggaaaacagggtttataaaaattattctcttgagtttataaattgttaaactcaatttatagctatgttaaactacgtaagaaccactatactgaaagaccatttaagagtattagtttatcttttagggaggaaaattaagaaaggaaaagtaaataagatcttacctaaagaagtttaactgaagcttagaactattttgctctacaccctcagctttcgttggnatccttataaactactgtattaaaggttttgtagaaacagcacagttntttaagactggcttgaacttattangccgtcaanagttctcttgnactannacctgtgtcccttgagagtcctcgctggggttatttcctttccttnntttgaaaaanccagcttttaaaaaatttaaaaggggtttcttctngcaganatncccntaagtanccacntnccttatcctgagaanggcnacacncacttantttaccgctttntnttttccaaattac

SEQ ID NO: 22 - DNA, 58 bp, Homo sapiens
  misc_feature 22, 26, 34, 35, 43: n = A,T,C or G
tcccaggccgatctcaaactcntganctcctaanncacctgcntcagacccccaaagt

SEQ ID NO: 23 - DNA, 332 bp, Homo sapiens
ctttgggaaagttggtatgaagcattaccacttaaagaggaaccagagcttctgcccaactgtcaaccttgacaaattgtggactttggtcagtgaacagacacgggtgaatgctgctaaaaacaagactggggctgctcccatcattgatgtggtgcgatcgggctactacaaagttctgggaaagggaaagctcccaaagcagcctgtcatcgtgaaggccaaattcttcagcagaagagctgaggagaagattaagagtgttgggggggcctgtgtcctggtggcttgaagccacatggagggagtttcattaaatgctaactactttt

SEQ ID NO: 24 - DNA, 273 bp, Homo sapiens
aaaaaggtggtagaggacattgaatacctgaagttcgataaagggccgtggctcaagcaggacaatcgcactttataccacctgcgattactggttcaggataagtttgaggtgctgaattacacaagcattcctatctttctcccggaagtcaccattggagctcatcagactgaccgtgtcttacatcagttcagagagctgccgggccgcaagtacagccctgggtacagcaccgaggtgggagacaagtggatctggctgaagtgaacg

SEQ ID NO: 25 - DNA, 615 bp, Homo sapiens
  misc_feature 553, 556, 564, 598: n = A,T,C or G
aaagtttgtgcctgtaatacagtccgtgatatactggaaggcagaacaattagtgttcaatttaaccagctatttcttagaccaaataaagagaaaatagactttcttcttgaggtatgttcaagatcagtaaatttagaaaaagcttcagagtctttgaaaggaaacatggctgcttttctaaagaatgtgtgtctggggttggaagatctgcagtatgttttcatgatttcttcacatgagcttttcattacattgttgaaagatgaagaacgaaagctacttgttgatcagatgaggaagagatcccctagagtaaatctgtgcattaaacctgtaacttcattttatgatatcccagcttcagcaagtgtcaacattggtcagttagagcatcaacttatattgtcagtggatccttggaggattagacaaattttaattgaattacatggtatgacttcagaacgccagttctggacagtgtctaataagtgggaagtaccttctgtctatagtggtgttatcctgggaattaaagacaatttaacangangatttggnttatattcttatgggacctgcccggcggccctcnaaagggcgaattcacac

SEQ ID NO: 26 - DNA, 714 bp, Homo sapiens
  misc_feature 562, 568, 573, 575, 578, 593, 614, 623, 629, 635, 665, 673,682, 684, 702, 705: n = A,T,C or G
ccacaaaaaagcatgcaaagtcattgttacaacagggatctacagaactatttcaccaccagatatgacctagttttatatttctgggaggaaatgaattcatatctagaagtctggagtgagcaaacaagagcaagaaacaaaaagaagccaaaagcagaaggctccaatatgaacaagataaatctatcttcaaagacatattagaagttgggaaaataattcatgtgaactagacaagtgtgttaagagtgataagtaaaatgcacgtggagacaagtgcatccccagatctcagggacctccccctgcctgtcacctggggagtgagaggacaggatagtgcatgttctttgtctctgaatttttagttatatgtgctgtaatgttgctctgaggaagcccctggaaagtctatcccaacatatcccatcttatattccacaaattaagctgtagtatgtaccctaagacgctgctaattgactgcccttcgcaactcaggggcggctgcattttagtaatggggtcaaatgattactttttatgatgcttccaaagngccttngcttntnttnccaacttgacaaaangcaaagtgagaaaaatgatcntattttacnttaccnacagcngggaccccttttttaataactggcaccttnttttcctnccggcggcntnaaaggggaattccccccntgngcgttctag

SEQ ID NO: 27 - DNA, 401 bp, Homo sapiens
ccatcatcgcacaaggaaactggtttcatactgaagtttaagactgagttctacacctgtgggcttctacactacggaacgggagtgggggggctgaaaagcttattaatatactttgtcttagcccacactgcaaatacagcactattatggcatcttaatcaagcagagagctgttcacatgctttctacagtatctttataaataaaaggttcctttatccaccaaacaacacctgaaatgatctaagttcaaaacattagtatacaaggacctagataatgggacatgtgaaaacttagtacattcaatttaggttttggacacttagttggataaacaagtttatttgtaaatttagtcaacatacataattgacctaaaaacttcagtaaatttt

SEQ ID NO: 28 - DNA, 444 bp, Homo sapiens
ctggcaacaaacctgaccacatgattaagcctgttgaagtcactgagtcagcataaataaagactgcacaggagaattacccctatacctgagcctcaaccttctgggggaaggggaactagataacatacttcttacttgtctgtacagtaccttgttgcagatgggtgatatataatggtaatagaatagcacagccagacttgcttcctgcatggtagggagagacacaaaagatgggaaactgcttttccacaaggaatctccgtagaattttgcggcgaccagatggtgcataggtctggaaggtctgatctcccttggtcttccatgggatggttagtgtggaggggagatatagattgtccggccgctttgtgattccatggattgattcagtcttctggatttttttttctttatattttgggtactggagctttt

SEQ ID NO: 29 - DNA, 159 bp, Homo sapiens
gctgacgcaaacatgcagatctttgtgaagaccctcactggcaaaaccatcacccttgaggtcgagcccagtgacaccattgagaatgtcaaagccaaaattcaagacaaggagggtatcccacctgaccagcagcgtctgatatttgccggcaaacag

SEQ ID NO: 30 - DNA, 168 bp, Homo sapiens
  misc_feature 21, 49, 117, 134, 136, 142, 161: n = A,T,C or G
cctcgagtctagtgaggcgcntcagaaattcgcaggagccaaagccatntcatctgacatgttctttgggcgggaggtggatgcggagtatgaggccaggtctcggccgcgaccacnctaagggcgaattccancncactgncggtcgttactagaggatncaagctc

SEQ ID NO: 31 - DNA, 685 bp, Homo sapiens
  misc_feature 317, 326, 331, 336, 353, 371, 377, 384, 386, 408, 426, 430,439, 495, 529, 538, 564, 575, 587, 597, 604, 608, 621, 624,634, 641, 645, 652, 667, 668: n = A,T,C or G
aaatttgaggtggtcttaagaataacaaatgaacagaattccaaatttttgaaataggtgaactgctgcagttacaggtatacatttaggaaaactgtatagctcttacaagaccagcaatgtaactttattttgtacatttttgaattgaaaatataaacaataattaaaaaataaaaagaaaatacagcataataaaaaacatacgcttctcaattaaatgtactggatacatataaattttaagggaagaagcaaaaaaggaaaatgattgatatttaagtgcagactgactacctagacaaaaaaaaaaaaanttaaaaaantttcntaaancctttagtttttttatnactaatatccatatggtnggagtntcgccantntggaagggattttgttatgttngcatatgttacactttcngggnaattacatnatggcttttaaggccctgggaggcttggtttttggaaacaaaattggataaaaatncttgttaaaacgcaataccccttatttttttggncccccattngcaaaaaaagggaaaattccttttanatttttttacncccaaatgcctnaacttttacntttaccntggncggaaccccttanggngaattccacnccttggnggcnttctagnggatcccacttggannaactgggggaaaatggg

SEQ ID NO: 32 - DNA, 159 bp, Homo sapiens
gctgacgcaaacatgcagatctttgtgaagaccctcactggcaaaaccatcacccttgaggtcgagcccagtgacgccattgagaatgtcaaagccaaaattcaagacaaggagggtatcccacctgaccagcagcgtctgatatttgccggcaaacag

SEQ ID NO: 33 - DNA, 283 bp, Homo sapiens
  misc_feature 84, 90, 93, 94, 102, 113, 127, 130, 131, 189: n = A,T,C or G
gtagttctgaacgttagatattttttttccatggggtcaaaaggtacctaagtatatgattgcgagtggaaaaataggggacanaaatcnggnnttggcagnttttccatttncatttgtgtgtgantcnntaatataaatgcggagacgtaaagcattaatgcaagttaaaatgtttcagagaacaantttcagcggttcactttataataattataaataaacctgttaaatttttctggacaatgccagcatttggatttttttacctgcccggggcggc

SEQ ID NO: 34 - DNA, 349 bp, Homo sapiens
ccaacatctggcttctaaaggaaaggcttttggtcttttcaatcacttgctgatagggtgagactgcattgttacccataaccacatgacctaatttagaatcaatcttggcatccagtcttgcatttctaatcaaatttacaatccacctttcagcttcttctggagtcatgttcaatttatctgccaacatgttaatgctgatacactggtggatgcgacagaaagtctcaaatatgaagagacgggcattttcaatgaaatcctcaagacaagccaccaagaagaagtcattcacaagcactgattcacattccctcagctttttctgagccccatcaaagtcaaa

SEQ ID NO: 35 - DNA, 732 bp, Homo sapiens
  misc_feature 526, 540, 565, 568, 576, 582, 584, 591, 608, 650, 695, 708,712, 729, 730, 732: n = A,T,C or G
attttgttttataaccacttctaaatattctcggttctttctttttgttgttgttaattaaggggttttggttttgttttctgtttactttgtgtgcaactacctgcttttaatgactcactttgatcaaatgacagtgaacaaagccagcccaagctggtaaggtgctgttcacttgaacaggtgctgttgcgcagaaaggaaactctgtgactaatttagatagtggctttccttcttctggattcttttcattgaattctcacagtaaatatttacggagttttcaaattgcagcaaatatactgtatgagaaaatattaatacagattaaaagcctttcttacatcttgaaaattttctaatatttgagaatttcacagggatgttttttatattggacccttttgactttccagtcctgtgactttctacttttagtagagagtcagaatctctggactggagaataatgaagaagttcactgactgtgcactgtgcttagagacccctgccgcaccacantgccaatgcttgtnagacacatgcccttcggcagcattncanaccaggangggaananaaagaanaaaactttttttccttntacttaaaaaattaggcagcttaaaaccttagggtttttttnttaacataaccaaatttcaatctttccttatttgacactgggtanaacttttgtttgnttanactttttggtacccagnnan

SEQ ID NO: 36 - DNA, 119 bp, Homo sapiens
aaagccatcattatatattaaaagagcagaggtaattctgtcttctccggttgtgcagcacgatctgctccagctcgtcatgccagggcccggaaaacctccaccttctcccggtacag

SEQ ID NO: 37 - DNA, 342 bp, Homo sapiens
ccactttctttcccacctgggaaggcggcatctatgacttcattggggagttcatgaaggccagcgtggatgtggcagacctgataggtctaaaccttgtcatgtcccggaatgccggcaagggagagtacaagatcatggttgctgccctgggctgggccactgctgagcttattatgtcccgctgcattcccctatgggtcggagcccggggcattgagtttgactggaagtacatccagatgagcatagactccaacatcagtctggtccattacatcgtcgcgtctgctcaggtctggatgataacacgctatgatctgtaccacaccttccggccag

SEQ ID NO: 38 - DNA, 444 bp, Homo sapiens
aaatgaagtctcctgaagacctctcttctggcaaaaaaaacacgtatcagactctgggaaaacattcagacccacttctagctattactgaaataaatgattagaaagttacgttggtgagccgaagttaaacctaaagctatcccctggatctttctagcaataaacccatgttgaacctaccatgaaaactttcattcactgtgcttttggttacgttgcttcctgattagtcattaattttaatgaggttttttccttgtgttgagtatgaatagaccttacagtttgaggatctctagaattccctgaattattggaaagacattcatgactcccagtgtgactagttaagagccccagggagcctgtgaagactagaatctacaagtaacctgcactaagaacgaaattcagtaaaggagactcaagcttagctcctgg

SEQ ID NO: 39 - DNA, 372 bp, Homo sapiens
  misc_feature 354: n = A,T,C or G
aggtcactggaatcaatagttaacaagatggttgtcctttggggccacaggtgtgttgctaacctccacttttcttcctgatttgctttgctttccggggtttgaggatggtgtagtttacgtacactgtatactgatctgacaggaaggggacatagaatgcccgcagcagctttgaagatctagaagcatcaaggaatggtctataggccaagctgatccattcttctttattggatgaatattttggctcccggggtgtttctctcatggtgtccaaatccactaaataatggcatttactgatatcaatatatctggatggctcttctagattctggtcattcatgtcantaggaacaatccgggtgg

SEQ ID NO: 40 - DNA, 288 bp, Homo sapiens
aaagcaaatacaaaacagaacagaggattcaaaccgcaagtatgggagatttaggccctgcagaggcagaccattccttagtatctcacaaagcagagtaatactggaggcagagtagggggtggttggagagcagttagtacaaagaggcagaacagtgtctggtttacttggcatacacagaatctgcactgccggttccagaactgcaaagttggtgaactacaggagatgtgggtatttagactccaaagtttatactgagctcagtgcctgggaccgctccag

SEQ ID NO: 41 - DNA, 682 bp, Homo sapiens
  misc_feature 487, 515, 563, 565, 600, 615, 618, 626, 634, 638, 664, 669,673: n = A,T,C or G
cctgagaccctcaacagtgctgtgtgtacagaaggcccccagaatccacacaaaggggccgcctgaaacctagagcatttgtgaaggaggaaaatggaaggaacaactggatgttgtaaatgtttctcatctggccttaaaatccatgaaagctggaaaatcacaaggcatctgtgcatatactggtggattttaatgagagtcctgtgtttggagcaccagaaataaaccagcttcagaagcaaagttaacaggaggaggaagtagagctagagatggaaggagacccagccagcccgggctccagtgacatcggctggtacacgcttttgtttgcttacgcttgttgaactgagtttttcatatgtaactaacgaatactggcacatgatctgaacgtctatgacactctttcgagcttgacacagtgaagaacatagaaggagactcacccatctgccagggtcacagaatgatcatactcaanattttctggggagtcaatggcaaatttnctgggtattttacagatgaagaaggacttaagaaggtcttgggacccnantcacggacaccccttactgatttttggaacttgtntttggacttcgccgnacnccttaggngaattcanaccntgggcgttcttatggatcccactcgnccaanttgngtaatatgg

SEQ ID NO: 42 - DNA, 346 bp, Homo sapiens
  misc_feature 250, 265, 269, 294, 299, 306, 317, 328: n = A,T,C or G
aaagccaactcttctatataatcagtttgatgatctgaattagaaaataccgctggataatcatgttcttgatacacatttcctttttttttgagatggagtctcgctgttgtccaggctggagtacagtggcgcgatcttagctcaccgcaacctccgcctcccgggttcaagcgattctcctgcctcagcctcccaagtcactgggattacaggcgtacaccaccatgccgggctaatttttttatgnttaggcagatggggnttcnccatgctggtccgggctggcttgangcccntttcttnatagggccatnaggggaaaagngcttgcctaaccccccat

SEQ ID NO: 43 - DNA, 410 bp, Homo sapiens
  misc_feature 261, 281, 287, 305, 309, 311, 317, 323, 343, 349, 354, 358,388, 394, 397: n = A,T,C or G
ttcaaagaatcacttttaggcttacaaaaataaatatttgtcaaaatgttcaataaatattacataaaactagcagcaaaaagtatctagaaatctgtcgtgtgcaaatagttttcttcccaactatcattcccatggtcccaaataaattttagaatctagtcccatccccttcctagacaagctgcgttcaacaatctccaagagacaaagtaagattggaagtttaaggacacgcacacaagacatatatataaaatnctctgaatgtgcaataaaangaagtnctttgttaaaaagttatngggncnaaatgntccaanggccttaaaccttagacctnattggnaattngccncccttaaccaatggaccctcgaattcttgntcaagnggnaccttccttcatt

SEQ ID NO: 44 - DNA, 457 bp, Homo sapiens
  misc_feature 266, 275, 325, 347, 349, 354, 410, 415, 419: n = A,T,C or G
aaataatacagaacaattaaagctaaccaagtgcaacagataaataagcctgccagttatacacataactttataccaaccataattcagccagtcaaaattccaaaaacaatccaaataacttccaacatactagcggtcaaactaccgaataaacttgatgcagaccagtattcccaagttgcaatagtatccaatgactttgctgaaatgcataaaatggacaagcctaggtatctgcgcaaccagcaggttttttttttgtnccaaggctngagaatgcctggtaaaagcttgccagaaaactctcaaaaggaactggttncttgcccttctttttctttaananacttnaaaattttgaataaaaaacccttcctggggttttggaacaatttctaaaggggttncccanattncctcccccaaaaaaatttttaagcttcctttggggagg

SEQ ID NO: 45 - DNA, 245 bp, Homo sapiens
  misc_feature 90, 185: n = A,T,C or G
gaagactattctcagcaatcagactgtcgacattccagaaaatgtcgacattactctgaagggacgcacagttatcgtgaagggccccanaggaaccctgcggagggacttcaatcacatcaatgtagaactcagccttcttggaaagaaaaaaaagaggctccgggttgacaaatggtggggtnacagaaaggaactggctgccgttcggactattttgtagtcatgtacagaacatgatcaaa

SEQ ID NO: 46 - DNA, 381 bp, Homo sapiens
  misc_feature 151, 190, 200, 214, 225, 226, 248, 270, 274, 279, 282, 289,290, 303, 306, 309, 315, 320, 331, 333, 338, 349, 352, 358,359, 365, 369, 374, 378: n = A,T,C or G
aaatgagggtttaataatcttaattatctaccaaaagtagattacgacgcatgaagatcacataaaatgaacttcacttctcagcatcacaaacatttggaatacaaaaagtccagggatggatattagaagtaagaaaagtacaaaagangtttgcttagaaataacaaaaaattaaaaaaaaaaaaanggatcccccntccccccaatcccnataatcggggnntaggcaaccatcggggtaaagnctcccttttgctcactcctgtntaanaatgnggngcccacnnaactggttttttncanttnttgtgngccanaaaaaccctcncnccctngcccggggggnggncgtttnnaaaagnggcnaaatntccnagc

SEQ ID NO: 47 - DNA, 364 bp, Homo sapiens
  misc_feature 8, 19, 50, 145, 151, 155, 262, 267, 273, 287, 311, 327, 328,331, 342, 353, 355, 356: n = A,T,C or G
ccgggcangtaaatttgangtggtcttaagaataacaaatgaacagaatnccaaatttttgaaataggtgaactgctgcagttacaggtatacatttaggaaaactgtatagctcttacaagaccagcaatgtaactttattttngcattnattnaattgaaaatataaacaataattaaaaaataaaaagaaaatacagcataataaaaaacatacgcttctcaattaaatgtactggatacatataaattttaagggaanaagcnaaaaangaaaatgattgatntttaagtgcagactgactacctanacaaaaaaaaaaaaannttnaaaaaaatttnattaacccccntnnactttttg

SEQ ID NO: 48 - DNA, 486 bp, Homo sapiens
  misc_feature 325, 344, 381, 426, 438, 450, 455, 465: n = A,T,C or G
ggcggctaccagtgtaaagccagagctgaggttcttgatagtccacaatgggtgaaccacagcaagtgagtgcacttccaccacctccaatgcaatatatcaaggaatatacggatgaaaatattcaagaaggcttagctcccaagcctccccctccaataaaagacagttacatgatgtttggcaatcagtcccaatgtgatgatcttatcatccgccctttggaaagtcagggcatcgaacggcttcatcctatgcagtttgatcacaagaaagaactgacaaaacttaatattgtctatccttattaatttctttgggaccnttcagatattttaattaanggagcccctgggagtttaaaacgagaaagagaaactngaaagatcttaaagctggttttttgtacacgtgcatcatcttatnaatgaataccgnccccaccaagcnagaanaaccttgaantcatgatggagggccagaaac

SEQ ID NO: 49 - DNA, 397 bp, Homo sapiens
  misc_feature 285, 323, 328, 343, 353, 354, 357, 373, 385: n = A,T,C or G
aaattgtattgaacagggcatataaaatgcattctgtaccctgatctggcatatagcttcaaaactgcagtggcgagtgtccatctcttagttagctaccttaactgtccacccttactacctgtgggatcgttacctggtttgtcttctctgtgtcctggagcaaagccagttcctaaaactaaaactccattctagtcttgggaagaaaagtttctactcagaactggggaaggagtggaacttatgacttgggcctctaggctgtctctgtcccctcagctncccgacatgcatttactctctgccgggggtctgcagtnggttncaaccctaccctctnttttggcctnnagnctttacaacccaaggnaagaagggcctngggctcttccct

SEQ ID NO: 50 - DNA, 92 bp, Homo sapiens
  misc_feature 72, 84, 85: n = A,T,C or G
cgcgtgaagaggaagaatgccaagaagggccagggtggggctggggctggagaccgacgaggaggaggattnagtccacttgtnnctctggg

SEQ ID NO: 51 - DNA, 306 bp, Homo sapiens
  misc_feature 219, 254, 256, 284, 296, 302: n = A,T,C or G
aaagtatatggaagatgtgcaaaggttatatgcaaatactgtaatattttatataaatgacttgagcacctgcagattttggtatccctgagagttcctggaaccaatccccttcagataccaaggaatgactgtacatgtttggtagaaaactagttgtctctacctagtctccattctggtcacttctttagtttcctaatttcagagtaaggccantctccttctgtgatggttaattttgtgtcaacttnantgaaccaagggatgcccagatacctggntaaacatttttncacgtngtgt

SEQ ID NO: 52 - DNA, 541 bp, Homo sapiens
  misc_feature 326, 334, 345, 366, 368, 393, 397, 418, 452, 458, 473, 479,488, 501, 502, 504, 511, 515, 516, 540: n = A,T,C or G
aaaatgttacacaaatttctttatgataggacttctcagagcttttagcattctaatgcagagtggaaatgtgaatggcaggattcagtataatcagcacgtcccaactctatctgaacacagaactcttgttctgcatatcatcgatttgcacaccctggaacaacgtttggtagaaatcaacttgggaaatgttgcacagcatgagtgatgaatacagctaagttaggatcaaagtacaggcgtatctcgttttactgcacttcactttactgagcttcatagatattgtgcttttacaaattgcacgtctgtagcatcctccnttgacaantctattggtgncatttttccaagaggatatgntnacttcatgtctctgggtcacatgtngggnaattctcacaatatttcaaanatcattattattttatcttgttccggtgacctgngggcangcgagcttttatgtnactatngtatgattnggagggcccgcgnntnacaaccntttnnaatgggtagctgtatttataaatng

SEQ ID NO: 53 - DNA, 321 bp, Homo sapiens
  misc_feature 188, 214, 221, 249, 250, 267, 305: n = A,T,C or G
aaaaaaatccaaatgctggcattgtccagaaaaatttaacaggtttatttataattattataaagttgaaccgctgaaacttgttcactgaaacattttaacttgcattaatgctttacgtctccgcatttatattaaaaattcacacacaaatgaaaatggaaaaactgccaatacctgatttctgncccctatttttccactcgcaatcatntacttangtaccttttgaccccatggaaaaaaaannttaaccgttcaggactncccattaccggaagaaaaaaaatttttttttttttggnaaaaaaaaaagttccc

SEQ ID NO: 54 - DNA, 547 bp, Homo sapiens
  misc_feature 322, 394, 457, 481, 485, 510, 528: n = A,T,C or G
aaaaatgtaacaaacatctaaatatctgacaataaaatctgaaatgctgtaacttcaacattaactgcaccatccaaattcttgtgacttacgcatttttgcccaatttaacctttctgatgttcccctgcccccagacaccataaatgcattgtaattttgaaaatatctgccaactacacactgaaaattttaacctgatcaattgacataatataaaatctgtcccaaagcactgaaacaagaaaatctataccatcatgctacagacgtacttagaaaacttaaaaggaagaagtaaatatcagctcagtgatttatnatgaagctaataaaattcaaggccagtattcttaagtgtaatgaacattatttgaacattcacacatgaaanggtaacaaagggctatgaacttggggtaactttaaaacgtttcagatgtccggagttcaccanatgtaattggattcaggtgggatnccgncgctcctcggcctttttaagtgaangcgtgtgctgcctgactnggcgcctgcttggcctcag

SEQ ID NO: 55 - DNA, 439 bp, Homo sapiens
  misc_feature 315, 321, 327, 336, 358, 364, 367, 369, 383, 392, 425: n = A,T,C or G
aggagacagccagaagcaagcttttggagctgaaggaacctgagacagaagctagtcccccctctgaattttactgatgaagaaactgaggccacagagctaaagtgacttttcccaaggtcgcccagcgaggacgtgggacttctcagacgtcaggagagtgatgtgagggagctgtgtgaccatagaaagtgacgtgttaaaaaccagcgctgccctctttgaaagccagggagcatcattcatttagcctgctgagaagaagaaaccaagtgtccgggattcagacctctctgcggccccaagtgttccgtnggtgcnttccanaagcagggngtatgctcacattcatggcctntgacancgnangaagaagtggtgtngatggagcngacgtccctaatgtccggcttgagagccccacncccgcgctcctgcc

SEQ ID NO: 56 - DNA, 339 bp, Homo sapiens
  misc_feature 303, 332: n = A,T,C or G
aaaaaaatcaacagtgttaacagtgggtgggtatgtttccagacccctcaattcactcatatgtacagacaggattgacggggggaatccctaaactttttattctaacaagttttatttatttattttcttttttgacatggagtctcgctctgtcgcccaggctggagtgcaatggcgtggcctcggttcactgcaaccttcgcctcccgggtttaagcaattctcctgcctcagcctcccaggtagctgggattacaggtgcatgctactgcgcccggctaatttatgtatttttattanagatggggttcaccatattggacctcggncggacca

SEQ ID NO: 57 - DNA, 432 bp, Homo sapiens
  misc_feature 162, 172, 232, 240, 246, 252, 271, 273, 296, 313, 324, 370,380, 418: n = A,T,C or G
ctgcccaagggcgttcgtaacgggaatgccgaagcgtgggaaaaagggagcggtggcggaagacggggatgagctcaggacagagccagaggccaagaagagtaagacggccgcaaagaaaaatgacaaagaggcagcaggagagggcccaccctgtatgangaccccccanatcagaaaacctcacccagtggcaaacctgccacactcaagatcttctcttggaatgtgnggatgggnttcaancctggnttaaaaaaaaaggattatntngggtaaaggaagaaccccagatntactgtgccttcaaganaccaatgttcngagacaaactccagacctcggccgcgacacctaaggcgaattccanacactgcggncgtctagtggatcgactcgtccaacttgcgtatctggnatactgtttcttga

SEQ ID NO: 58 - DNA, 217 bp, Homo sapiens
aaaatcctgattttggagacttaaaaccaggttaatggctaagaatgggtaacatgactcttgttggattgttattttttgtttgcaatggggaatttataagaagcatcaagtctctttcttaccaaagtcttgttaggtggtttatagttcttttggctaacaaatcattttggaaataaagatttttttactacaaaaaaaaaaaaaaaaatat

SEQ ID NO: 59 - DNA, 566 bp, Homo sapiens
  misc_feature 252, 285, 298, 332, 337, 415, 445, 469, 472, 473, 479, 487,494, 515, 531, 543, 551, 557: n = A,T,C or G
cctacacgccgccgcttgtgctgcagccatgtctctagtgatccctgaaaagttccagcatattttgcgagtactcaacaccaacatcgatgggcggcggaaaatagcctttgccatcactgccattaagggtgtgggccgaagatatgctcatgtggtgttgaggaaagcagacattgacctcaccaagagggcgggagaactcactgaggatgaggtggaacgtgtgatcaccattatgcagaatccacnccagtacaagatcccagactggttcttgaacanacagaaggatgtnaaaggatgggaaaatacagcccaggtcctagccnatggnctggacaacaaagcttccgtgaaagacctggagcgacttgaagaaagattccggccccatagaggggctggggtcacnttctggggcctttcgtgtccgaaggccagncacacccaagaccacttgggccgnccnngggccngcacccgnggggtgntgtcccaagaagaaaataagncttttaggacctcccngggcggggcttngaaagggngatttncaggccact

SEQ ID NO: 60 - DNA, 234 bp, Homo sapiens
  misc_feature 221: n = A,T,C or G
cctgggtgcctactctgggagcagcgactccgagtccagctcagacagcgaaggcaccatcaatgccaccggaaagattgtctcctccatcttccgaaccaacaccttcctcgaggccccctagtttctccgtccctacacagggagctcctccccaagggtagatcggaccgttcatgctgcctataggcattatgtccctcaaaaaaaaaaactccttngcctgcatcctgt

SEQ ID NO: 61 - DNA, 375 bp, Homo sapiens
  misc_feature 215, 340, 344, 362: n = A,T,C or G
ccaccatttcccctgcatcgtctctcctacgtaatcagtccctgatgaactctcttcccataaaaatccctgtgtcctaaagtcatggcgtgctctatttcatggtcatttgtagagcacagcagcactgtgcctgtcaggaaaagtgtgtgctaactgcaataagcatgatgactgccatcacggttttgttattctctgtccacctccatggnctctaaatcagacaatctttaatctgaaaaggcagtgtccttattcctccaggaaactggatagaaaagctcctcatctaatgaagcaagccctgtcatcttactgattctttcccagaccacangtgnaaaggggccttcggccgngaccaccgctaaa

SEQ ID NO: 62 - DNA, 455 bp, Homo sapiens
  misc_feature 249, 251, 305, 309, 313, 328, 334, 340, 350, 372, 384, 390,394, 401, 408, 413, 422, 440, 441, 442, 450, 453: n = A,T,C or G
gggtgggaagagaagaaatagcagagcctattttggtgaggttttttgtttttaagtcaaagaagactcagtatgctttccctgaggaatgaaaaagggattgaggagttgcctgactcctgggtgggtggggtacaggcagttaggtgctgaatgaagctgccatccttgctgcagcttctaactggtaaaaagatccagggatggagatgggaaggttagaaaggcagccctcacctctgaggacanangccggggtccaggcccctgggcgcaaaggtgcctcatagcatagccagcatttnagtnctcncaaacctactggccncatttngggctnaggggtggancctgctccgggccggccccttnaaaatggcgaanttccancacncttggcnggtccgntgccnattgggatncccccctcccgtacccannnctttgggnttnat

SEQ ID NO: 63 - DNA, 560 bp, Homo sapiens
  misc_feature 332, 455, 490, 532, 541, 548, 559: n = A,T,C or G
ctgacctgactttgctttaggtcattcttttttatgccagcactgtttgaaagtgcatgtcaagcggctagctccacatttggtcttcgaaagggaaacgcatgcagttaaaacgtaatgtacatgatggaattgggaggatcatagtctcagtttccccccctctttctcccatctaggagacctccgtggactgcagcaaaattaaaaataaagcacagacaacagaattattcttcactgagagagtttaatacgcgtttctaacaccatctatacttgctttgttgttcttgaggtcatcaacacacattctgggtattccagactanaactcttctggttgctaactcagttttaagaagatgaaagacataactagacttaccgtatttcagtagtttgctctttaatttttcccttactcttaatttcaggcgacctccaagaaaggnatcaagtccgactgggataaaccagatggagaaangtcacagatttaaggaaaaaaagcagatcttgcccacccagngaaaatcancattganggcaacaaaang

SEQ ID NO: 64 - DNA, 105 bp, Homo sapiens
  misc_feature 11, 25, 35, 39, 44, 47, 52, 73, 82, 84, 100: n = A,T,C or G
ttttttttttnatcctgccacaatntttttaattncgtncaaanatntgacntgtcacccagggacccatttnacccactgntntgtttggccgccagtnttttg

SEQ ID NO: 65 - DNA, 427 bp, Homo sapiens
  misc_feature 284, 324, 334, 344, 346, 349, 401: n = A,T,C or G
aaaaactgactaggtcaaaaatagttacgcctgcaggttgacctattcagactttgccaaactcctccaagttcaatataaattgacgttttcagagtacaaagtcaattttacggaaacgctgttcctccttttccatggagccaatctgggtaattttttcattaaaattcttcttctgcctgtttgctgcggaactctttgagctgctgtagccgctcgatagtttcagaaatggtgcgttccccgtggaccttattgtctcttgtgcggatattaacagngccactgattttctctttttcccaaccacctaaaatgganggtatactgnggcttactgngncantttcgaatcttttttattcaatggtaccagccctgggatcccagaatcaaantggtcttggcccttggaaattttggg

SEQ ID NO: 66 - DNA, 362 bp, Homo sapiens
  misc_feature 328: n = A,T,C or G
aaatgacgaaactcagcggaaatatattcagggattgaagaggttaatgaccatttgccagaaacactttcctacagacccatccaaatgtgtggagtacaatgcactgtgagatctgtgtatggtgtgttaataacaataagaaacttagggaagcaggctgtggacttctggaattaccaacaggaatgaggaaagaagaaaactggagtttccagtctctgagttctacctgatgtaactcttgattggttttaagaactttgttggccttcatttcatatctgactgcaagctgatttttctttcttgctttcattttaattangtcccaaaattaaagtttttaccttgccccgggc

SEQ ID NO: 67 - DNA, 357 bp, Homo sapiens
  misc_feature 181, 184, 213, 217, 219, 235, 240, 246, 267, 275, 276, 281,285, 287, 298, 305, 312, 314, 323, 332, 339, 345: n = A,T,C or G
cctgacgtttagagaaggttacaaaggcggccaggatctgagtatttccaaaaagctctggaggcagcattgaggtttccttccagttgaatcactgactttaggtcgactggggtactttgggttttttgggccattttttgggggtgtgggaagcttttctcacagatttactacgagnggngaaaaacttggcctctggcttttttggantctngntcgcatctttcttccncagcnaagganttttttccttcactgcctctnctttgatnnttagnttgntnctctgggcttnttctctnggggccncnaaactcctncagcttttngggggtnttcagnatgcttggcttg

SEQ ID NO: 68 - DNA, 395 bp, Homo sapiens
  misc_feature 232, 250, 259, 295, 298, 302, 308, 312, 316, 323, 335, 343,355, 359, 362, 366, 373, 383, 385, 390: n = A,T,C or G
ctgacatttattattttggtttcattttcctttttgcgtctttatgtttctttcgacaatccatacgcaggttggttgttctggcctcccaagagttcctgctcatattacttcctactcctctccagaataagtcagaaccttgaagtcgttcatcattcttagagaaaaagaaaaatctagtggtctctttctcaagtaatgatgcttctctgaaaagaaagggacaaangagagagaaaaataggtnttggttggnttaatttcaatatttaagaagaaatatttacattcnaanacanaaaatncacnattntgttaanattatatccttnttcagttnccccccttcaancccnggnggancggaagnactctttaantntatcntgcct

SEQ ID NO: 69 - DNA, 363 bp, Homo sapiens
  misc_feature 244, 246, 282, 301, 327, 328, 331, 344, 345, 346, 356: n = A,T,C or G
ctgggaacaactttcttcaaactacctggtggtgaacttaacccaggagaagatgaagttgaaggactaaaacgcttaatgacagagatactgggtcgtcaggatggagttttgcaagactgggtcattgacgattgcattggtaactggtggagaccaaattttgaacctcctcagtatccatatattcctgcacatattacaaagcctaaggaacataagaagttgtttctggttcagcttnangaaaaagccttgtttgcagtcgctaaaaattacaanctggtagctgcaccattgnttgaaatttggttgacgatggcaccnnggntttgggacccctnnnttttttagtnttccctt

SEQ ID NO: 70 - DNA, 269 bp, Homo sapiens
  misc_feature 119, 168, 190, 205, 206, 219, 227, 230, 244, 248, 253, 254: n = A,T,C or G
cctattctcttgttgaccagggtcaagacctgctctgtgatgcaggctaccttcatcctgacttctgcggctggatccttggtgatggagaagtccagccgaacatagatgataacggngaagaacaggatgtagaaggccgccaccaccagcaggggctcctgcagnatgagcaccttgttgaacgtgnagtggaccacaatgnnctgaatgggctgntctaccanatntttcttgtagggcnacantcacnnggcggccaaatgtgg

SEQ ID NO: 71 - DNA, 546 bp, Homo sapiens
  misc_feature 420, 455, 535, 544: n = A,T,C or G
aaactaaatatataaatctataatgttaaacatatgttcattaaaagcatagcactttgaaattaactatataaatagctcatatttacacttacagcttttcatttgatcaggtctgaaatctttagcacttaaggaaaatgactatgcataattatacctgaccatgaaaaaaataagtacctcaaatgcatgcatttgcactggtgattccaactgcacaaatctttgtgccatcttgtatataggtattttttacatgggttgacatgcacacaacaccattttcattcagtatgaaccttgaggctggtgccatttttcccttaaccaaaccaacctgaaggtgacctcgaaacttgtttcataaatctttcaaaagttgttttacatcaatgttaaaatttcaaaatgctgcanggcaatttaatgtataaaatattagtaagaaaaantatgtatggcatacttagtagaatagatcacaacatacaaattcaatcaatgcatgctttaggtgtaagcatgagaatgnacatgtttntg

SEQ ID NO: 72 - DNA, 395 bp, Homo sapiens
  misc_feature 315, 338, 341, 383: n = A,T,C or G
ccagtcagtgttcatgtctctcaccagtgcctggagggtccccagccaaggaaagaactggtcagttcctgccagcagcttgagctggaatgccctgggagggtcagtagagggtggtcacttgaggagcttcacagagaggcggatgtcaacatcgcagaggaagatgtccatgaggtcatggcctgcctcctgtgctatctgggagatcacgtggcccttcggaccaatcaggagtttctgagggtatgtgaaagagaaggaagccaggaatgatggcacatgcctgtagtcccagctacttgggggggtaangtgagaagatcctttgagcacangantttgagtccacctgggtaacagtgcgacccctctttacctcngcgcgaccacgc

SEQ ID NO: 73 - DNA, 527 bp, Homo sapiens
  misc_feature 14, 16, 21, 25, 38, 329, 333, 390, 412, 429, 451, 455, 470,482, 483, 486, 498, 499, 511, 519, 524: n = A,T,C or G
aggtaaaaatgggncncaaantcgnggtggaccaaacnaatccacatttatttattgatttttcgttagtttaaatccttgaggggtacagcatcactcggattctgtgtccaatggccttagcaggaagattgcttcggaatttggcacgaaccatgccactgtttccatgggcccgagttacttttccccagatgactctggttttgtttggtttgccgccaggagtgactgtgttgttctttgctttatatacataagcgcatctcttgcccaaatagaattctgtttcatctcgggcgtaaaacaccttcaattttaagaaaganctgngtgctcccttgggttccggagacccccttatgccagcaaaaatggccttggacccanccttccagaatagtccttttanaagtcccgttcccacangactgccgggcggccgtcgaanggcnaattccacacacttnggggcggtctannggnatcgagctcggnnccaacttggcgnaatatggncatantgt

SEQ ID NO: 74 - DNA, 557 bp, Homo sapiens
  misc_feature 345, 462, 466, 478, 521, 549, 553: n = A,T,C or G
ccaagccaaggaaaccattcccttacaggagacctccctgtacacacaggaccgcctggggctaaaggaaatggacaatgcaggacagctagtgtttctggctacagaaggggaccatcttcagttgtctgaagaatggttttatgcccacatcataccattccttggatgaaacccgtatagttcacaatagagctcagggagcccctaactcttccaaaccacatgggagacagtttccttcatgcccaagcctgagctcagatccagcttgcaactaatccttctatcatctaacatgccctacttgggaaagatctaagaatcttgaatcttatcctttgncatcttctgttaccatatggtgttgaatgcaagtttaattaccatggagattgttttacaaacttttgatgtgggtcaagttcaggtttagaaaagggagtctgttccagatcaatncccnaactgtgcccangcccaaaggagacactaactaaaggagtgagatagattttaangggaaacatttttccaagtcttggcatntttnaacc

SEQ ID NO: 75 - DNA, 552 bp, Homo sapiens
  misc_feature 317, 339, 340, 346, 365, 378, 389, 394, 438, 459, 469, 471,475, 500, 516, 517, 528, 536, 537: n = A,T,C or G
aaaagcagcttcagctcaaacagcaccagtgctacatggacagcatggcagcgcagccgctccatgcggaaaagaaaggcaactgctgcttcaaactgcgctgtcaggaacaggacttggaagtagaggaagggttgctggttcaccgtaaagtgggactcgccatagtcttccaacaactgcttctggaactgtgagagagtgagcctgtcttgtggggagctggtgccatcgtcgtcaaaacacacttggttcaacttcagccacaggtaatcctcagttttgtccggcacttcactctggttgtcggtgaccgncacattttgccaatgatacagnncacggnccgcttgtagggatctgtnttgttccttgagngccctacggtnatgcngccggagcttgttttccgtagctggggacaatcttctgccttcntgtcatgtctcctggaaccangttttacctngnccgngaccacgctaaagggcgaattcaanacactggcggccggtnnctatggatccnaactcggnnccaagcttgggggta

SEQ ID NO: 76 - DNA, 451 bp, Homo sapiens
  misc_feature 42, 314, 366, 426: n = A,T,C or G
ggaacctgccatgaacccaacaaatgccaatgtcaagaaggntggcatggaagacactgcaataaaaggtacgaagccagcctcatacatgccctgaggccagcaggcgcccagctcaggcagcacacgccttcacttaaaaaggccgaggagcggcgggatccacctgaatccaattacatctggtgaactccgacatctgaaacgttttaagttacaccaagttcatagcctttgttaacctttcatgtgttgaatgttcaaataatgttcattacacttaagaatactggcctgaattttattaacttctnattaaatcacttgagctgatattactcttccttttaagttttctaagtacgnctgtagcatgatgggtagattttcttgtttcagtgctttgggacagattttatattatgncaattgatcaggttaaaattttcaa

SEQ ID NO: 77 - DNA, 136 bp, Homo sapiens
gtgaagaaggcagctctcactcaggcaaagagccaaaggacgaaacaaagtacagtcctcgccccagtcattgacctgaagcgaggtggctcctcagatgaccggcaaattgtggacactccaccgcatgtagcag

SEQ ID NO: 78 - DNA, 546 bp, Homo sapiens
  misc_feature 322, 330, 352, 365, 369, 386, 451, 463, 482, 487, 530, 535,543: n = A,T,C or G
ctgtgcaagatgcctcagtgtgatgcaaagactctatattggaaaaattacaacttggtctaaaaacttattggtgttgatatttttaatccaaaataaatttataaaaaaatcctttaatggactatttcagtttaatatacagtaatacactgtagataaagttaatattccccccactaatttaatagggattgatatcaatgtttctgatcactggagaaataaaaactaatgtggacctttgatatccatggcataggaggattcccacagtttatcctaagaggatctggggaatattaaatattctaattccagnggcttagncaatatgaattttaagtacaangatatttcaaaancagnggtttggaaaaaaaaantaatcaaaacccataatcacatctcttgtggataacaatattaatataactttttacccacccangacttgcctgtncaaactcagaactgaaagnttggntctgtagacttctggtaacaatctggcaaacactaaatggagngtggncttatctnttt

SEQ ID NO: 79 - DNA, 545 bp, Homo sapiens
  misc_feature 306, 311, 323, 501, 516, 525, 532, 534, 537: n = A,T,C or G
aaacatggataaaagtattacatgggtccactgttaaaacagacaacatgtggcaaattaattctggtatcatgttttccaacaaagcttagaaaataaaggtgttgaggtggctttggactaagtttaatagtcatctcctctgctgacaacttctttacatgttggacgcaacaggatggtatgttcaaattgcgctgtatatgatcctttaatgtcacataatggtggatatggatctacaatgcccaagtcacacagattcttcagagccatcaagtatttactttctcccaagcgatccanccatntggcggcagaangcaaagggttccaaagttttcattgatgacatttaacaagtgttttgttcttggaagccttattgggcacatgtccaacatcaaaatttttcatgtaatgtgaacattccatatcatcatgaacaacaccttttcctgtactaccaaatgtttcaattgcatatacttctccttcctncattcttgttggctnccttctttnacaatcngnacntgttttcc

SEQ ID NO: 80 - DNA, 547 bp, Homo sapiens
  misc_feature 257, 321, 374, 391, 413, 430, 436, 442, 447, 448, 458, 469,472, 474, 479, 498, 507, 513, 522, 524, 537, 542: n = A,T,C or G
aaaaatggggcacaaatacaggcaggtaagagacagacagctctcatccctgcactcttggctttctgagagatatgaccccaaggtcctggagtctagctgctgcttcctcctctgggaaatagaggagtgatattggtagtacctagggcatagcactgctgggacaattcagtgatttggggactgatctccatatcaagatgacctgatcctgtctgtgtgcgggacagtggctagcacggagcccttgttangcccgcctaccatctgacccttctcaaaccttcccgtctgaggacatctgcatgcaccacttgncccttccaatggctgtcttactctggatggccctgacacctggagaaggccanacaagccaagtgggttntctaaggacctttgtgaattcntaggacctcgggccgcnaccacncttaangggcnnaattcccagnccacctgggcnggncnggggncctaattggaatcccgaancttcggggncccaancctttgggngnaatccatgggtcnattancttgg

SEQ ID NO: 81 - DNA, 515 bp, Homo sapiens
  misc_feature 335, 337, 348, 380, 403, 441, 476, 484, 500, 508: n = A,T,C or G
aaagtttgtgcctgtaatacagtccgtgatatactggaaggcagaacaattagtgttcaatttaaccagctatttcttagaccaaataaagagaaaatagactttcttcttgaggtatgttcaagatcagtaaatttagaaaaagcttcagagtctttgaaaggaaacatggctgcttttctaaagaatgtgtgtctggggttggaagatctgcagtatgttttcatgatttcttcacatgagcttttcattacattgttgaaagatgaagaacgaaagctacttgttgatcagatgaggaagagatccccttgagtaaatctgtgcattaaccngnaacttcatttnatgatatccccagctcagcaaggagtcaacantgggcagttagaagcatcaactnatattggccagtgggatcctggggaggattagacaaantttaatcgaattaccatgggtgttgactttcaganccgcccanttctgggacaggggcntattaagnggggaaa

SEQ ID NO: 82 - DNA, 192 bp, Homo sapiens
cctttccccattgctcctttccccattgctcaatggattccatgtttctttttcttggggggagcagggagggagaaaggtagaaaaatggcagccacctttccaagaaaaatataaagggtccaagctgtatagtatttgtcagtatttttttctgtaaaattcaaacacacacaaaagaaaaatttattt

SEQ ID NO: 83 - DNA, 572 bp, Homo sapiens
  misc_feature 339, 349, 350, 467, 510, 537, 549, 559: n = A,T,C or G
ctaatacgactcactatagggcaggtgcaggcagctaggtgatggcaagagatgttcacttgaagatcttgccctgattgaaggctttgcccacatgctggaaggccccctcccaggaaaagtactctcgaaccagcgtctgggtctcctcgctgccaggatccagtttccgccatgtgtatgactcgtagtccacctgccaatctggactcagcggaaaggcaagctcctggcctcggaagacccagactccagaaatggagctgctattgttggttccaaaaaggatgacactggcgaaggcattcttcctcagcttgtccagtcgctggaacattncagtgatgannatgcagctcatgaaggtctgagtgagttcttcagggaagcgatactcttgagtaccacagggaccagccgtccttatcaaagtgctcccagaaatatggcagtgccacagagagtgngtcctcattggagtacttgcgcttaaattcatccaacacaaangtctcttgggcagtgaacgaaggggtncttgccttgggncacagccacngctgtccattatc

SEQ ID NO: 84 - DNA, 588 bp, Homo sapiens
  misc_feature 387, 447, 496, 527, 541, 548, 552, 557, 578, 579: n = A,T,C or G
gtgaagcaacctttaggtaccaaagtcattcccaccatgcagtcaccttgtcattacttacacttttcttctttttcattttacagtaaaaaagtcaagaacatgtaaaaactgtggcttttctggaatggaattggacatagcccaagaacagaaagaaccttgctggggttggaggtttcacttgcacatcatggagggtttagtgcttatctaatttgtgcctcactggacttgtccaattaatgaagttgattcatattgcatcatagtttgctttgtttaagcatcacattaaagttaaactgtattttatgttatttatagctgtaggttttctgtgtttagctatttaatactaattttccataagctattttggtttantgcaaagtataaaattatatttggggggggaataagaatatatggactttcttgcaagcnacaagctattttttacctgccccgggcgggccgctcgaaagggccgaantccaagaccacttggcggcccggtactagtnggatcccaactcgngaccaancttngcgtnaacatgggcataagctggcgnnctcccggaa

SEQ ID NO: 85 - DNA, 399 bp, Homo sapiens
  misc_feature 170, 303, 345, 350, 353: n = A,T,C or G
ctgctctgtgctgggcatctgtctactgctcagtactaccaagggttgtatgaaatcttggaattggctgaggacatggaaattgacatcccccatgtgtggctctacctagcggaactggtaacacccattctgcaggaaggtggggtgcccatgggggagctgttcanggagattacaaagcctctgagaccgttgggcaaagctgcttccctgttgctggagatcctgggcctcctgtgcaaaagcatgggtcctaaaaaggtggggacgctgtggcgagaagccgggcttagctggaangaatttctacctgaagccaggacattggtgcattcgtcgctnaacanaangtggagtataccctgggagaagagtcggaagcccctggacctgccc

SEQ ID NO: 86 - DNA, 224 bp, Homo sapiens
ctgtacaggttctctgttcttcagggtcattttcacagctttaagatgtgtattcatgctgacatccacacctgtgattgttccatggacctgtgttccgttcttcaattcaatggttacagtttcatgactcaatttcatcaaaaatctcacgagcttcatcctagcggcgccgtcaccctctgggtccgacagcacacagaatccttcaaccgaacactgac

SEQ ID NO: 87 - DNA, 511 bp, Homo sapiens
  misc_feature 5, 6, 20, 26, 55, 403, 454, 503: n = A,T,C or G
caggnncaagagtttccttnaccatnagacactgtactatgacacagaccctttnctcttctacgtcatgacagagtatgactgtaagggcttccacatcgtgggctacttctccaaggagaaagaatcaacggaagactacaatgtggcctgcatcctaaccctgcctccctaccagcgccggggctacggcaagctgctgatcgagttcagctatgaactctccaaagtggaagggaaaacagggacccctgagaagcccctctcagaccttggcctcctatcctatcgaagctactggtcccagaccatcctggagatcctgatggggctgaagtcggagagcggggagaggccacagatcaccatcaatgagattagtgaaatcaccagcatcaagaangaggatgtcatctccactctgcagtacctcaatctcatcaactactacaanggccagtacatcctcacactgtcagaagacatcgtggatggacctcggncgcgaaca

SEQ ID NO: 88 - DNA, 114 bp, Homo sapiens
  misc_feature 103, 111: n = A,T,C or G
cctttcacaactaggactgagaatgtatgtaaaagttctgtgacagtacagaaggaaaacaactttttatgtatagcttctaaaaggggaaaaaaaaaaaaanaaaacccnttt

SEQ ID NO: 89 - DNA, 609 bp, Homo sapiens
  misc_feature 499, 536, 550, 557, 561, 565, 570, 584: n = A,T,C or G
cctttatggatgaaagtacccagtgcttccagaaggtgtcagtacagctcggaaagagaagcatgcaacaattagatccctcaccagctcgaaaactgttgaagcttcagctacagaacccacctgccatacatggatctggatctggatcttgtcagtgactttatgagagtttctgccacaaggtgcccaagaggagaggaatgggaagagtgccccagcacgtggtgactgcgtgatttctgctcgttgcctttgaagataactggcaggactgactgtagaacactttgacttttttcaaaaagtgatggaatttgtacatccaaatgaatattgtatagacaattttcccaggaatgtgcaaaatgcttgaaagttcaaacttcttttttgaaatgatcttcagatccagtggcccattcttttatctttatcctgtgaaggtggttttcaaggtttgaaacaatccaaaaatcatttaagaaccaagtctaangaacattttagtggaccttgcccgggcggcccctaangcgaaattccaccncacttgnggcngttncttangatccaacttcggnccaacttggcgtaatcatggcctag

SEQ ID NO: 90 - DNA, 594 bp, Homo sapiens
  misc_feature 439, 461, 468, 491, 506, 559, 567, 578: n = A,T,C or G
aaacttcagctcagtttcttaaccaagaaccacgtcaaccctccagggttgtggtttgtatttttgcctttaagcattatctcctttccaccaagaagcctacttaggtttaacacatgaaagcagtgtctaaaaattagatcggtcctaaattggaatgggatgtcttccttgcatgtcccataccagggaatttttttaacacacagtgtagagcctttgccagagatgttgaaagggagattaaaggcttgagggatgaatttgatcatcattcttaaagtcccttccaatcctgtgattctctgattccctgagtctcgtttattattggacatgcctagcccatcaccagtgacctgcccgcatattgctggcttcccttggataacggagagcctatcaccacatgcctttgttgtcttccatcatatcaagngagttgctttctggactttttncatctanaacctgctaaggttggttttganaaaaagatggagaantttcttttcatgagtttgtagggcaaaaaaaattctttttacctgcccgggcnggccctcnaaaaggcgaantccagccccttggcgg

SEQ ID NO: 91 - DNA, 363 bp, Homo sapiens
ctgcaagccattcgaataattcaagagagaaatggtgtattacctgactgcttaaccgatggctctgatgtggtcagtgaccttgaacacgaagagatgaaaatcctgagggaagttcttagaaaatcaaaagaggaatatgaccaggaagaagaaaggaagaggaaaaaacagttatcagaggctaaaacagaagagcccacagtgcattccagtgaagctgcaataatgaataattcccaaggggatggtgaacattttgcacacccaccctcagaagttaaaatgcattttgctaatcagtcaatagaacctttgggaagaaaagtggaaaggtctgaaacttcctccctcccacaaaaa

SEQ ID NO: 92 - DNA, 450 bp, Homo sapiens
  misc_feature 148, 352, 373, 425: n = A,T,C or G
ctgctcgaacactgagcttgtgtaaaagttgaaccatgaggccacaaaagcggtcaaaggttctgggaattcgggtctggggattcacttcaatcagaacattcttctgtgtatggatataaacctgtagcaagccagctcggttcangggactatccatcagcatcagcaaactctggtgggtgatatctggccgcgcttccccagggtcccgtccattcttcaacaatatagacttgtgcttgtcacagttgagtagctcatatgtcttccctaccttgactgtctccagactggccccttccagcaccacaataagcctacggcctccgatcttgtttcctgcccctantcggggccgcttgggtggcanagcatcccaatcctgtgcctgctcccaccgcttcgttcacgaagcttgaatncataaccttcggccgcgaaccacgc

SEQ ID NO: 93 - DNA, 537 bp, Homo sapiens
  misc_feature 157, 404, 406, 442, 453, 460, 487, 507, 513: n = A,T,C or G
cctggcctcacatgacccctgctccagcaacttgaacaggacaagcagcagctacatccttaaggtcgggaaagtaagatgaggatttggatcctgcattgccctgcctcccaccctatctctccccaaattataaacagccatccttgggaagcangcagagttaagacgtctccccactgccctagtgacatacacaccaacaggagagcatgttcagatggcacagaatccagggactgcatttcatgaggagaaactggtaccaaaatatgggtggggagtcggggggtgtgagaaggcaagcgcaaagagaaccttcctccgtttctactcatcggatcctgacgctgactcctctgactggggggagtactggctagttcttcttcttcagagtactngntcctcctcctcttctttttgctcttgttctctcccnaagagctctcntcactanacacaaactctttgctcttgaagcttntcgcttactgcttgaggacnacttgnatgatgacccctaaaaggcgggga

SEQ ID NO: 94 - DNA, 404 bp, Homo sapiens
  misc_feature 143, 370: n = A,T,C or G
gcgagaagaaaaagggccgttctgccatcaacgaagtggtaacccgagaatacaccatcaacattcacaagcgcatccatggagtgggcttcaagaagcgtgcacctcgggcactcaaagagattcggaaatttgccatgaangaggtgggaactccagatgtgcgcattgacaccaggctcaacaaagctgtctgggccaaaggaataaggaatgtgccataccgaatccgtgtgcggctgtccagaaaacgtaatgaggatgaagattcaccaaataagctatatactttggttacctatgtacctgttaccactttcaaaaatctacagacagtcaatgtggatgagaactaatcgctgatcgtcanatcaaataaagttataaaattgcaattttttttt

SEQ ID NO: 95 - DNA, 560 bp, Homo sapiens
  misc_feature 400, 403, 407, 421, 431, 482, 488, 489, 492, 508, 516, 518,521, 526, 532, 542: n = A,T,C or G
aaaggtatttgctcattggtctggcttagagacaggaagacatatgagcaataaaaaaaagattcttttgcatttaccaatttagtaaaaatttattaaaactgaataaagtgctgttcttaagtgcttgaaagacgtaaaccaaagtgcactttatctcatttatcttatggtggaaacacaggaacaaattctctaagagactgtgtttctttagttgagaagaaacttcattgagtagctgtgatatgttcgatactaaggaaaaactaaacagatcacctttgacatgcgttgtagagtgggaataagagagggctttttattttttcgttcataccactattgatgaagatgatactaaatgctaaatgaaatatatctgctccaaaaggcattnatncttnacttggagatgcancaaaaacacnaaaatggaatgaagtgatactcttcatcaaacagaagtgactgttatctcnccattnngtnaaatcctaagcagaanacataaanantcntgacnaaaaanacacttggcntattactggcttggaaag

SEQ ID NO: 96 - DNA, 618 bp, Homo sapiens
  misc_feature 394, 558, 598, 603: n = A,T,C or G
ccaggctggttttgaactcctgacctcgtgatccacccgcctcagcctcccaaagtgctgggattacaggcgtgagccaccgcgcccggcaagaattcaaagttaaaacaggttaccactttcacctattaccatcaggttgcttatttttgttttatgttttttatttgtatgcatgtttactttatgtttcagtttactaccccctaaggcagcaagagagcaggaagataagcaaaatagagatgtttttgacaacttggcactgagagactatcctaagggaataatctgaaatacataaaaacattttattcacaaaattggtcatcacagcattatttacaatactgaaaatctggaaatagcctaaatttctaacaattgaaagaangttaagtaaattataagactacacaataaaatatattaccagcaatatatctttgtgaaaatctataataaccacacataatacttagtaaaaaagaacataaattacatgataaagaatatgatcagaacaatgcaaaaaattccacccccaaaaaagacaanatttatttggcatttcgtggcaaaatttcatgtatttggntgganttctaaattttccga

SEQ ID NO: 97 - DNA, 346 bp, Homo sapiens
aaaatttccttccatttcagtatatgcatactcagttcatcacatagtaatatcaataaaaaaataaacttccatttcttataagaaaaacattaacttaattcacagttagccttttcccacaacactcaatactccagtagcttctaggaagagaggtatattagtgataaaaatggaatattaaaaatccatgacttgggagtaaacggagcccttaactcctcctctccccctacctgaatcacaaaagggttttcctgaaatgagaggggatgggactggggtcagcaggattctcacctcggtctaactacaaggtacggggagaagacaggagggctgg

SEQ ID NO: 98 - DNA, 499 bp, Homo sapiens
  misc_feature 293, 430, 461: n = A,T,C or G
ggaaaatgcttctcagtccacagttaaagttctcatcagactactgaaggacttgaggattcgttttcctggctttgagcccctcacaccctggatccttgacctactaggccattatgctgtgatgaacaaccccaccagacagcctttggccctaaacgttgcatacaggtacagcatgctttgggtttagggttggttgtaaactattttgtgcattcctttaatacctcatacctccctgtgttctaggcgctgcttgcagattctggctgcaggactgttcctgccangttcagtgggtatcactgacccctgtgagagtggcaactttagagtacacacagtcatgaccctagaacagcaggtattgggacagatatgaactgagttgttttgccccactcttttgaatactgctgctcagcangcaaagtgggaatatggtctttacgggtcangaatttggggattctgaaagactttggtcctgagattt

SEQ ID NO: 99 - DNA, 396 bp, Homo sapiens
cctgctcgctgggcagacataccatgtggctgtggtctgctacctgaggtctcaggtcagagccacctaccatggaagtttcagtacaaagaaatctcagcccccacctccacagccagcaaggtcagcttctagttcaaccatcaatctaatggtgagcacagaaccattggctctcactgaaacagatatatgcaagttgccgaaagacgaaggaacttgcagggatttcatattaaaatggtactatgatccaaacaccaaaagctgtgcaagattctggtatggaggttgtggtggaaacgaaaacaaatttggatcacagaaagaatgtgaaaaggtttgcgctcctgtgctcgccaaacccggagtcatcagtgtgatgggaacctaagc

SEQ ID NO: 100 - DNA, 274 bp, Homo sapiens
  misc_feature 264: n = A,T,C or G
ccgccatggccgaggaaggcattgctgctggaggtgtaatggacgttaatactgctttacaagaggttctgaagactgccctcatccacgatggcctagcacgtggaattcgcgaagctgccaaagccttagacaagcgccaagcccatctttgtgtgcttgcatccaactgtgatgagcctatgtatgtcaagttggtggaggccctttgtgctgaacaccaaatcaacctaattaaggttgatgacaacaagaaactagganaatgggtagg

SEQ ID NO: 101 - DNA, 589 bp, Homo sapiens
  misc_feature 440, 454, 480, 538, 559, 566, 587: n = A,T,C or G
cttttagaaagccatcaagaagagacaaatcagttacttaaaaaaattgctgagaaagatgatgatctaaaacgaacagccaaaagatatgaagaaatccttgatgctcgtgaagaagaaatgactgcaaaagtaagggacctgcagactcaacttgaggagctgcagaagaaataccagcaaaagctagagcaggaggagaaccctggcaatgataatgtaacaattatggagctacagacacagctagcacagaagacgactttaatcagtgattcgaaattgaaagagcaagagttcagagaacagattcacaatttagaagaccgtttgaagaaatatgaaaagaatgtatatgcaacaactgtggggacaccttacaaaggtggcaatttgtaccatacggatgtctcactctttggagaacctccgaatttgantatttgcgaaaagngctttttgagtatatgatggggtcgngagactaagaccatggcaaaagttttaccaccgtctgaagtccctgatgatcagactnagaaaattttggaaagagaanatgctcngttgatgttcttccctccagngg

SEQ ID NO: 102 - DNA, 209 bp, Homo sapiens
  misc_feature 7, 48, 71, 81, 84, 93, 105, 113, 121, 134, 139, 204: n = A,T,C or G
aaatttnggttaaaaatttaaaccggcaaacctttccaaacctttaanttaaaggaggaggcccggcaaanatttttaggnggnggccccccnctttcctttaanggcaaatnggcccaantaggccctttccngcaanggaccaggaggcctcaggccccccaaagcttaggttagcaaataggagcaatttaaattcctagnccaag

SEQ ID NO: 103 - DNA, 655 bp, Homo sapiens
  misc_feature 447, 467, 494, 509, 512, 530, 539, 544, 553, 559, 568, 575,577, 595, 596, 604, 609, 618, 626, 634, 637: n = A,T,C or G
aaactttcaaagaatcacttttaggcttacaaaaataaatatttgtcaaaatgttcaataaatattacataaaactagcagcaaaaagtatctagaaatctgtcgtgtgcaaatagttttcttcccaactatcattcccatggtcccaaataaattttagaatctagtcccatccccttcctagacaagctgcgttcaacaatctccaagagacaaagtaagattggaagtttaaggacacgcacacaagacatatatataaaattctctgaatgtgcaataaaagaagtactttgtaaaaagttatgggcaaaatgtacaagggcctaaacctagactaattgaaatagcaccataacaaatgacctcaatactgtcaagtgcacctacttaataaaagttttagaacaaggcacaatacacttggaaaatctattgcacttttangaaaatttttgcccgtcttncttttgccactggtaaaaaagatgganccggttttggatcanccnccatttttggaacctttngggcccggnaaccnccctttaangggcgnaaattccanccccccntnggggggccggtttctttnnggggaatncccanacttcgggncccccaanctttgggnggnaaatcaatggggccatta

SEQ ID NO: 104 - DNA, 352 bp, Homo sapiens
ctgttgcttaccatgcccaaaataatcctccagttcctccaaagccacagccaaaggttcaggaaaaggcagatatccctgtaaaaagttcacctcaaactgcagtgccctataaaaaagatgttgggaaaaccctttgtcctctttgcttttcaatcctaaaaggacccatatctgatgcacttgcacatcacttacgagagaggcaccaagttattcagacggttcatccagttgagaaaaaactcacctacaaatgtatccattgccttggtgtgtataccagcaacatgaccgcctcaactatcactctgcatctagttcactgcaggggcgttggaaagacccaaaa

SEQ ID NO: 105 - DNA, 355 bp, Homo sapiens
  misc_feature 144, 309, 344, 347: n = A,T,C or G
aaataatccaggcaggagaagagaggagggcacacttggaactcccctccccacaatacgtgattatttacattttagtaattggacaatcccggctcaggaggaggttgcaagaatctgcaaaagttggagggagcgccccangagaacaaacagcaagccttatttcccctagcccatcccccaaaaaaccatccatcccatcctagtgtctggtggtgtccggtggtgtccatcttccattccttcccaaattatggaagtaaggttcttctcaccagaataagagcacttgggataacagagtanggtcccctcacccaaaaaaaaaaaaaaaaaaaacnctngggggaaa

SEQ ID NO: 106 - DNA, 102 bp, Homo sapiens
  misc_feature 2: n = A,T,C or G
tngaatcactcctatagggcgaattcgagctcggtacccggggatcctctagagtcgacctgcaggcatgcaagcttgagtattctatagtgtcacctaaat

SEQ ID NO: 107 - DNA, 357 bp, Homo sapiens
ctgggaacaactttcttcaaactacctggtggtgaacttaacccaggagaagatgaagttgaaggactaaaacgcttaatgacagagatactgggtcgtcaggatggagttttgcaagactgggtcattgacgattgcattggtaactggtggagaccaaattttgaacctcctcagtatccatatattcctgcacatattacaaagcctaaggaacataagaagttgtttctggttcagcttcaagaaaaagccttgtttgcagtccctaaaaattacaagctggtagctgcaccattgtttgaattgtatgacaatgcaccaggatatggacccatcatttctagtctccctcag

SEQ ID NO: 108 - DNA, 174 bp, Homo sapiens
aaaggtgataaacacaaaacctcgtcttttgttcaactttggatccattggcaattcaatggcctcaatctccccaaactcgccaaagtactccctgatcttttcctcagtggcttcaggattcagacccccaacgaagattttcttcaccgggtccttcttcatagccatggc

SEQ ID NO: 109 - DNA, 623 bp, Homo sapiens
  misc_feature 141, 508, 577, 609, 615: n = A,T,C or G
tgcaaattaattttaagggcttacagagtcatttgaagaagtgtggtgggaaatacaatcagattttggcatttcgacctacaggatggacacactctaacaagttcactagaatagcagatgttattccccagaccaaangaaacatttcaatatatggaattccttacagtgaacacagcagctacctagaaatgaagcgctttgtccagtggctgaagccccagaaaatcatacctactgtaaatgtgggcacctggaaatctaggagcacaatggagaaatattttagagagtggaaattggaagctggatattgatgatacctccgaggattcagtagtagttaagttccttggatgtagcttgttagtagttaaatctatagaaatgtgaaatacactttgtgtggaaaaacctcatgaagattgttcaaaatactttattttctcatttatgtttgaaccaacatgttcgtggtgcttgaatgcctctcagcatcatcaangataactgaaactgggtctcctgggaccttaattcttgtcccctgccttcatgggcagttatatttgcntcaagccttaaaaaagaacaaaggcagattcnggaccnaaggatat

SEQ ID NO: 110 - DNA, 638 bp, Homo sapiens
  misc_feature 27, 34, 36, 46, 312, 377, 436, 452, 468, 479, 498, 506, 525,528, 531, 536, 553, 562, 580, 588, 590, 602, 608, 613, 621,622, 635: n = A,T,C or G
actatgtgactatcattgatgccccangacacananactttatcanaaacatgattacagggacatctcaggctgactgtgctgtcctgattgttgctgctggtgttggtgaatttgaagctggtatctccaagaatgggcagacccgagagcatgcccttctggcttacacactgggtgtgaaacaactaattgtcggtgttaacaaaatggattccactgagccaccctacagccagaagagatatgaggaaattgttaaggaagtcagcacttacattaagaaaattggctacaaccccgacacagtancatttgtgccaatttctggttggaatggtgacaacatgctggaccaagtgctaacatgccttggntcaagggatggaaagtcacccctaaagatggcaatgccagtggaaccacgctgcttgancttctggacttgcatnctaccaccaactcgtncaactgacaancccttgcgccttccttttncaggatgncctacaaaaattggtgggnttnggncttgntcctgttgggcccaatngaaactggnggttctcaaaccccgggnttgggggncnacttttgcttcntcaacntttcnaccggaanntaaaatctttccnaaa

SEQ ID NO: 111 - DNA, 492 bp, Homo sapiens
  misc_feature 344, 349: n = A,T,C or G
aaaaaaagtacaaatctgttaaaaatttcaatcagtatacacatatatataatacaacatactagttatgttaaatgctacaaaccaatgtgaatcccatggaatggaaaaaaccacacatttaagctttaagaaccatttttttctctatatattagcattttctcaaatacatacatgggaaaaatgaggtaactgtaaaatgtgcaaggaacagggcccccaaaattacatatatttctacatatatatgtaattttatatatatataaaacctttctaacacagaacacaggcgctgggcccagccagggctgggggaaggtgcccactgtcatgcctangccanaagttggtaaataagagagtaaacaatggcaagcccccaccacaggaaatcattggtaacatggcatctatagcaaggtcggcagatcacaaacatcctaagtaattgttgtataaatcttgttttttaatgatgatcttttt

SEQ ID NO: 112 - DNA, 598 bp, Homo sapiens
  misc_feature 318, 353, 420, 429, 477, 486, 500, 516, 526, 538, 544, 546,563, 565, 570, 588, 590: n = A,T,C or G
ctgcaggaagaggtggaggggggcctgtcattatgtttcccccccaccccccaacgaaaggaaaactaagactcccaacataaacagggccttgaggggggggattacaggcacttgggcatggagtcttcggctgcaggaagcactccgcttattcttcaggaatgggaaaggcgtgacccaacgagagcatctgtctcagagctccactcagggtcacccctctccagaggccggtatggggtggcttcagacttccactgcacgacctggagcaccaagaccacacaccacaataccaaattcacccaagaagangtttcagcattgtgtaggttggagtaaaactgcanagcagttccagggggtgtccatggaattttctgggcttcagaacagctaattgtagtgttcaagganatgatgganttgcagagagacctggtgccaaatcgaaggatacaggcagacaccaanaccaggaanacggctatacttanatggacctcgcccgcnaccaccttanggcgaattccancacacntngcggccgtactatgggnanccaantcgtcccaaccttggcgnantatggcta

SEQ ID NO: 113 - DNA, 489 bp, Homo sapiens
  misc_feature 166, 296, 385, 390, 411, 438, 439, 452, 459, 475, 479, 484: n = A,T,C or G
ctgtggcctaggctacctcaagactcacctcatccttaccgcacatttaaggcgccattgcttttgggagactggaaaagggaaggtgactgaaggctgtcaggattcttcaaggagaatgaatactgggaatcaagacaagactataccttatccataggcgcangtgcacagggggaggccataaagatcaaacatgcatggatgggtcctcacgcagacacacccacagaaggacactagcctgtgcacgcgcgcgtgcacacacacacacacacacgagttcataatgtggngatggccctaagttaagcaaaatgcttctgcacacaaaactctctggtttacttcaaattaactctatttacctgcccgggccggccgntaagnggcgaattccagcacacttgncgggccgttctaacgggatccgagctnngtaccaaggtggncataatnatgggcatatctggtntctnggaancgacc

SEQ ID NO: 114 - DNA, 244 bp, Homo sapiens
  misc_feature 231, 238, 239: n = A,T,C or G
ctgaccggaccggtcatgcccgtccggaacgtctataagaaggagaaagctcgagtcatcactgaggaagagaagaatttcaaagccttcgctagtctccgtatggcccgtgccaacgcccggctcttcggcatacgggcaaaaagagccaaggaagccgcagaacaggatgttgaaaagaaaaaataaagccctcctggggacttggaatcaaaaaaaaaaaaaaaaaanccccccnnggggg

SEQ ID NO: 115 - DNA, 349 bp, Homo sapiens
  misc_feature 225: n = A,T,C or G
aaaggtgataaacacaaaacctcgtcttttgttcaactttggatccattggcaattcaatggcctcaatctccccaaactcgccaaagtactccctgatcttttcctcagtggcttcaggattcagacccccaacgaaagattttcttcaccgggtccttcttcatagccatggcctttttagggtcaatgacacggcatccagcctgtgctccttctggtctangaccttctccacactggctgcatctttgaacaggataaacccaaaccctcttgaccgtccagtgttgggatccatttttattgtacagtcaacgacctctccaaatttagtaaaatagtctttt

SEQ ID NO: 116 - DNA, 561 bp, Homo sapiens
  misc_feature 488, 526, 536, 539: n = A,T,C or G
ccaacaaacttcaagccttgttcttccaaacactttttccagactggattcacctcaaatcggtggcggtgcctctcttccaagtagtctgcgtctccatagagtttcctcatgactgagttcttggtctggaacaaggttctcctcttgcccagcctcatggttccgcccatctgccctgggttgtgttctggcatgtctacgaccacgggatgactggtcgtagggtcaaactctgtagaattggcatcttgccatcccagcacgtttcttgagaattcaaccactgccaactgcatccctaagcacacgcccaaaaaaggctttttctgattccgagcccaggcaattgcttggatttttccttctgttcctcgaacaccaaatcctcctggaaccagcactccatgagcactacagagcttctgccaacttcgtggtagcgcacgggctcttcttgcgaggtgatgggctccaaagtcccgcanaatctattgtaccttgatttccaatttgtgggttgatngacctgcccngcngccccttaaaaggcgaattcca

SEQ ID NO: 117 - DNA, 383 bp, Homo sapiens
  misc_feature 314, 356, 372: n = A,T,C or G
aaactgggtgtttagaatattataatgtagcaactctggaaatatgatcctacgccctctcccgggtttgttcttgctgtttgttgcagtagttatttgtttaatgacttttctggttgtaaagtctgtattttttgtcacgtatggccgtttcttcctattcttttagcccagtggtcagtgataggacagagatttccttaaacatctggaatcaaaaaaacccataaaaccctcccagagtttgtagaagggtctgtgtgcatgtggggtcagcccttccgcggttaaacacattttcaactctgccttancttttgcttcctgtgtgtgcggagcctgaaggcggccagacntgagagcttagcttcngccctcgcagg

SEQ ID NO: 118 - DNA, 625 bp, Homo sapiens
  misc_feature 485, 574, 609, 622: n = A,T,C or G
aaaaagaaggtgctcagtttatttataaaatcggtgtcgccgactgctctgtttatgctaaaattatgatcatttttctcaactttggcatttgtcagttgggaagagaagccaaggcacctttggaagcatcataaaaagtgaatcatttgacccattactaaaatgcagccgcccctgagttgcgaagtggcagtcaattagcagcgtcttagggtacatactacagcttaatttgtggaatataagatgtggatatgttgggatagactttccaggggcttcctcagagcaacattacagcacatataactaaaaattcagagacaaagaacatgcactatcctgtcctctcactccccaggtgacaggcagggggaggtccctgagatctggggatgcacttgtctccacgtgcattttacttatcactcttaacacacttgtctagttcacatgaattattttcccaacttctaatatgnctttgaagatagatttatcttggtcatattggaccttctgcttttggcttcttttgttcttgctcttggttgctcactccaacttctanaattgaatcatttcctccaaaatataaaactaggncatatctgggggngaa

SEQ ID NO: 119 - DNA, 344 bp, Homo sapiens; identical to SEQ ID NO: 9

SEQ ID NO: 120 - DNA, 559 bp, Homo sapiens
  misc_feature 95, 97, 99, 105, 109, 111, 136, 373, 374, 382, 385, 389,392, 403, 429, 430, 452, 509, 531, 541, 546, 551: n = A,T,C or G
aaagtaagtcgtttccttttatttgaacacctaggggccattttagagttataattagcccaatttctatatcattttgtctcagggaatagaancntnaggganggananagttgggggaatggctggttggtanagtggtcagaatacacacaacatttataaataaagttagccatctaatatggttgtgattcgtggtacctcacaatgattatgatagtaacataaaagctcactgaccacaggtcaccgtaacagatataataataatgatctttgaaatattgtgagaattaccaacatgtgacacagagacatgaagtaaacatatcctcttggaaaaatggcaccaatagacttgttcaatgtnngattgctncanacgngcnatttgtaaaancacaatatctatgaacctcagtaaanngaagtgcagtaaaacgagatcncctgtcttgatcctaacttactgattatcctctgctggcacatttccaattgatttntccaacgtctcaagggtcaaancatgattcanacaanatttngtcaatga

SEQ ID NO: 121 - DNA, 576 bp, Homo sapiens
  misc_feature 409, 496, 500, 503, 516, 528, 532, 545: n = A,T,C or G
ccagtccaagctggaggaggccacaatgattcattagagctttgaggttgttcttgaagagctgaatataggacatgagctgtcccggtgtgactctccccatactcatcttgattggcaggttttctctgcttgccgcttccactagatgtctccgaacttccatcactgcctctttgtgcttagtgttcagtaaagcttcccatagggctttggctgtggtgtcactggattgtgaaagacagcctggtgcaaccacattataattttcctcctcagtatggagtgcagtgagcgctatcatgttaaccatcacatcatttgtgtggcctgggagctggggaagtgctgaaatgatcttctctactaagttgtctccatgatgtccaactgctcctgtgagatccanggttctgtccacaaaaaccactgatgccctgcctgcacagtcttcttcctgttctttgcaggggcataattggacctcggccgcgancacnctnagggcgaattcancacacttggcgnccgntctaatggatccnaactcggtccaagcttggcgtaatcatgggc

SEQ ID NO: 122 - DNA, 624 bp, Homo sapiens
  misc_feature 486, 571, 607, 614: n = A,T,C or G
gagagcgagctgagtggttgtgtggtcgcgtctcggaaaccggtagcgcttgcagcatggctgaccaactgactgaagagcagattgcagaattcaaagaagctttttcactatttgacaaagatggtgatggaactataacaacaaaggaattgggaactgtaatgagatctcttgggcagaatcccacagaagcagagttacaggacatgattaatgaagtagatgctgatggtaatggcacaattgacttccctgaatttctgacaatgatggcaagaaaaatgaaagacacagacagtgaagaagaaattagagaagcattccgtgtgtttgataaggatggcaatggctatattagtgctgcagaacttcgccatgtgatgacaaaccttggagagaagttaacagatgaagaagttgatgaaatgatcagggaagcagatattgatggtgatgggtcaagtaaactatgaagagtttgtncaaatgatgacagcaaagtgaagaccttgtccagaatgtgttaaatttcttgtacaaaatggttatttgccttttctttgtttgnacttatctgtaaaaggttcttcctctgcaaaaaatngcatgtntagtaattag

SEQ ID NO: 123 - DNA, 366 bp, Homo sapiens
  misc_feature 359: n = A,T,C or G
aaatagagttaatttgaagtaaaccagagagttttgtgtgcagaagcattttgcttaacttagggccatcaccacattatgaactcgtgtgtgtgtgtgtgtgtgcacgcgcgcgtgcacaggctagtgtccttctgtgggtgtgtctgcgtgaggacccatccatgcatgtttgatctttatggcctccccctgtgcacctgcgcctatggataaggtatagtcttgtcttgattcccagtattcattctccttgaagaatcctgacagccttcagtcaccttcccttttccagtctcccaaaagcaatggcgccttaaatgtgcggtaaggatgaggtgagtcttgaggtagcctangccacag

SEQ ID NO: 124 - DNA, 280 bp, Homo sapiens
  misc_feature 125, 134, 234: n = A,T,C or G
ctgaagcagcagaggtgattctgcgtgtggacaacatcatcaaagcggcacccaggaaacgtgtccctgatcaccacccctgttaagcattcccacgtgctgtcgatctttggaccagtttctancaaagttgngtttgaaagatactctattaaagaagactgtggaatctgtttatcggtgcccattatatccttaagtttggatatttagctgaccttcgctttaacatangtctaatttatttgccgtgtcattttccatacaaatcagttgattt

SEQ ID NO: 125 - DNA, 532 bp, Homo sapiens
  misc_feature 499, 502, 520: n = A,T,C or G
gttgggggccgtcccgctcctaaggcaggaagatggtggccgcaaagaagacgaaaaagtcgctggagtcgatcaactctaggctccaactcgttatgaaaagtgggaagtacgtcctggggtacaagcagactctgaagatgatcagacaaggcaaagcgaaattggtcattctcgctaacaactgcccagctttgaggaaatctgaaatagagtactatgctatgttggctaaaactggtgtccatcactacagtggcaataatattgaactgggcacagcatgcggaaaatactacagagtgtgcacactggctatcattgatccaggtgactctgacatcattagaagcatgccagaacagactggtgaaaagtaaaccttttcacctacaaaatttcacctgcaaaccttaaacctgcaaaattttcctttaataaaatttgcttgttttacctcggccgcgaccacgctaagggcgaattccagcacacttgnggncgttctagtggatccganctcgtaccaagc

SEQ ID NO: 126 - DNA, 534 bp, Homo sapiens
  misc_feature 376, 394, 451, 489, 524: n = A,T,C or G
ctgcaattacatcattttttatctatcttctgcttttactttgtgtagggtagggatggggacttacaaatgggccaaagacacttcaacctcaaaaccaaagagaaatctctgcttgcagagatacaaagaaagtaactctccctcttatgaaaagtaaccaggaactctactccagttatgagggccactgatggtgtgggagagctatcaagaagattcttcctagacgtggtgcaaagacagtgagaacccaggaaatcacattcatgggacacttgctcttaccgtcatcaccctctattctatctcaactttggccccatcaaatctaatgataaacaaaagaaggtaattacatgtagaaaatcaaagngaatgggaatgtggtggngtgaacataaaagaagaaattgaaaacaatcaaaagtttctcagtgctgctttcccncactgtcatagaaatctctgatccaattcttcatatgnctaacttccaaggacggctaacagcacagacatangaatccaacg

SEQ ID NO: 127 - DNA, 529 bp, Homo sapiens
  misc_feature 489, 505, 525: n = A,T,C or G
cctagcagggaagcagcatgcaggcttcacagcttaatgccaaggacagcgagtgaggctgggagcttctcttgggcctgctgggtctgtcagctctcggaatagggacagtccttactggtgccccaaggtgggacttggagaatattttgcttggcatatgtttggtctgaatggtgtagttgctggttccctagagaggaaaaggtggcaggcccagctttgctgggaaatggctcttaatttccagttgaaaccctagtagaattgtgaatgaaaacctcaaggttgagcccctctgccaagcagcagagctagtagaaggggatgcaggggcaaagcactcagttgccaagcaaggaggagagatgtacgtgggctgtgtggcagtccccacaccctgccctggcttcttcaggttatcgcaccactatggaatcctttgcagaatggtactcatataatgggtttacctcggccgcgaccacnctaagggcgaattcancacacttgcggccgttctantgga

SEQ ID NO: 128 - DNA, 531 bp, Homo sapiens
  misc_feature 332: n = A,T,C or G
aaatttctccctttgtgtgagtatgactatagttctggcctggtgttttctatttatttagttttagatgtcagcattttactatacttggtcctctcacttcagaataacagggctatttattgatacaaaggagaggtgttcagatcatcttgttaagatgcagagctcaaaataaacactaaatctttatttggagatccacatccttcctcaaaggaaggctcatgagtaaatttgtatgcagtataaagcccaagtagagggtgtatttttaatgactactttgcttacattttagattgtgcaaatgtctcaatcaatgcttgcangaatgtggaccttcctcagttttaagcagaagaccctgagcaataaatactgttgcatgcttccaataaccgtgaggggatgggatagaaatgctatctacccgacttctgaggagaaaacaaagcaggggcatgaaaaatatacaacagagatcagtaaatgggttcaaatgaaccagtaaaccatttttgccttacg

SEQ ID NO: 129 - DNA, 534 bp, Homo sapiens
  misc_feature 465, 527, 534: n = A,T,C or G
aaaaaacacatttatcagaatacttcaggaaaccatactatgtgtaatccaggaaatacactatttgcagaataggaaaatcatcactggcaacaaaagattaaaacaaaaataaagcaccaggattctgagcagttctaaggtgagtatatcagcagaaatagtgtaaatgctcttgactggttgctatgcaaacatgctaatgaggactagtccatgtcttataattttttttttaacatgtttctttggaaaaatggcaatattgagtggaagagaagctgtccttttagacacccagcttattggcctgggtgagaacaactttgagaactggcatgaaagcagaggtctcactgaagttgctggtgctaactatgtgggtatgcatggtcaatccttctgagtagtttcgagtttcaatgctccttgcaatgttggggtaaaccactggtgattgttggngaaagtgtctgttccctaagtttatcatacagaaactccaacgtttgctggcattcatctancttcctn

SEQ ID NO: 130 - DNA, 410 bp, Homo sapiens
ctgtctgaccatggggaccttctgtctgaagaggagctggatgaatgagactctgggaatcatctacacaggaccaaacccaacaggcgccctggcaccggggagggggtagttgtactctgcttgtacagtccttgagcccagtttacagatctggagagcaggaggccaggacaaggacaaaggctggaggatggagtaggacccaggggctctgccatcctaggcatcattcaaggtcttttatgaagactttacagatgtcctctgtaaatagcatcgagagtggagttcagctcctttctctacttttttttggtctgatggcacatatttattgttctgtggtctaatcacagtgtttctaaatgtaaaaagtgcatatgttggtgtagctagtcccgggcggc

SEQ ID NO: 131 - DNA, 529 bp, Homo sapiens
  misc_feature 483, 486, 487, 519, 525, 527, 529: n = A,T,C or G
cctggtggcgggcgcctgtagttccagcttctgggaaggctgaggcaggagaatcgcttgaaccctcctggggttgagagattgcagtgagccgagatcgtgccactgcactccagcctttacagtaaggaaaacagaagcccagagagatctgatctggttcccatgtggggtccgaagccactctgcggccattgcctttgtcatcctgcagggtggagacagctttgcctcccttttgcgtttgggatttttcagaataactgtagccagtgcttcctgtttatgagtactgttcatccaaataatccttcgggggtccttctggggggtgtgtgggaggagcaacacaaacacccagcaattggagaaaacagaagaaaagcgataatgtggtctggagactagaggatagctctgcggtcagccctgccctcgggaactgctggggaggtgggatggggtcagggagtggacctcggncgnnacccccttaagggcgaattccagcacactggnggccgntntn

SEQ ID NO: 132 - DNA, 341 bp, Homo sapiens
gcgagggtgagggccccctgctgcgctggctcaaggtgaacttcagtgaagccttcattgcctggatccacatcaaggccctgagagtgtttgtggagtccgtgctcaggtatggactaccagtgaacttccaggcagtgctcctgcagccgcataagaagtcatccaccaagcgtttaagagaggttctaaactctgtcttccgacatctggatgaagtagccgctacaagtatactggatgcatctgtggagatcccgggactgcaactcaataaccaagactattttccttatgtctacttccatattgaccttagtcttcttgactagaaaggccag

SEQ ID NO: 133 - DNA, 536 bp, Homo sapiens
  misc_feature 401, 526, 528, 529: n = A,T,C or G
ccagagtggtagaagagatacggagtaggaattaaaccacacaatgttatttagggactaagccatgcccctaacaagaaaacaagccaaaaggaaagtattaggcattctctgggaaggcatgcatttttttcccatgtctctggggccaaaaaccttataccaagtacctattggcacccgaatatatttgtagaatgaatgaatacatgaaaaaaaataaacagtaacctttctcctatattctactttccaagccaattaataagcaagtgtcttttcgtcatgattttttttgttttctgtttaggatttaacaaaatggttgagataacagtcacttctgtttgatgaagagtatcacttcattccatttttgtgtttttgttggcatctccaantcagaataaatgccttttggagcagatatatttcatttagcatttagtatcatcttcatcaatactcgtatgaacgaaaaaataaaaagccctcttttattccactctacaaccgcatgtcaaangnngatctgg

SEQ ID NO: 134 - DNA, 537 bp, Homo sapiens
  misc_feature 159, 454, 482, 524: n = A,T,C or G
aaaggctatatttttcagcatgtaggtagctacactgtaatcctgttgaagaaactttcctatttaagcttataggatgaaaatatataattaaagtcttctgatcatagcttgagaccatcaagggaatgtttagtttcctccacaaagagccaccangattttctcataatctcctttggtttcatccaggatggcttggcaaagggagataccatacatcttctgatagaatgctttgatatcattcatgtcaatttcagaacgggaaaccataatcctgatcaatgccttatggcgagttccaacacctttcatggcttgatgaagcttctctgcaaagaaagctggtttgcttgtggcgcacttcacgatagctgtgaggcatttctcaatgtcacctttcaactccaggtccagaactttgttcatgtcatgcttactgtacttgggngtatttctgaaacactctgcgaagttgnggatagcttctggtggtaaggatggtattgaacacgtttacntctgtcccctttc

SEQ ID NO: 135 - DNA, 532 bp, Homo sapiens
  misc_feature 56, 326, 354, 400, 410, 418, 469, 493, 518: n = A,T,C or G
ctgcaggaagaggtggaggggggcctgtcattatgtttcccccccaccccccaacnaaaggaaaactaagactcccaacataaacagggccttgagggggggggattacaggcacttgggcatggagtcttcggctgcaggaagcactccgcttattcttcaggaatgggaaaggcgtgacccaacgagagcatctgtctcagagctccactcagggtcacccctctccagaggccggtatggggtggcttcagacttccactgcacgacctggagcaccaagaccacacaccacaataccaaattcacccaagaagaggtttcancattgtgtaggttggagtaaaactgcanagcagttccagggggtgtccatggaattttctgggcttcagagcanctaattgtantgttcaangagatgatggagttgcagagagacctggtgccaaatcgaaggatacaggcngacaccaagaaccaggaagacggntatagctgaaatggactccggcccnaacaccctaagggg

SEQ ID NO: 136 - DNA, 535 bp, Homo sapiens
  misc_feature 492, 534, 535: n = A,T,C or G
aaaacaggcccagtcaatgccatttattatacatgtcaaacagcttctaagaccgaagggctcccataataaggttttggggattttttgttttgtttttcattttcttttttgcatcaaacaggttcttccaaaagcctgctcacaaggtagacaaaaacataaatcttcaggaaaatgaaacaagagaagctgaaacaatctacacctgaatgttaaaaaactcatcagacacaaaccacaccaaacactcatcccatttaatttcctgttacatgctctgaggaagccaagaacatcaggccccagggcagcaatgctctaggattccagctcggaccccctctatatgacagattcatgcacacacatccacacaccatataaccaggcagaaatacacatgcatgcacaggtggctagagaaccatagggcaggatgggaaaaagggctgatcaaggatatgcaatcaactggaaactgggacctanagaatgcttctgtgcaggatgaacatgagttaaaattaaaann

SEQ ID NO: 137 - DNA, 536 bp, Homo sapiens
ccaggctggtctcgaactcctggtctcaagtgatccgcccgcctcggcctcccaaagtgctgggattacaggcttgagccaccatgcccggccagacttacttttttgttaacggtctttgaaccttttcacggcacacatgtaaggccgcctgtgacatgtggtaccctggcctccaactggacacaactgcatttatagtttagcgaaaatacaaagttctgaaagtagccttaaaagaagtgccctttgctttgacatagcaatatcaaaagcaagtgggactgtgcaatcagagccatgagttttatgaaaactactttcctttcacatcatttgttagagaatgccacacccatgatcatgtaacattattacaatcatgaaatattactacattcgtgattaacattacccaaaaggcacatcttcaaatgttgaattaagaaaatccaaaaatcaaaacagtagagaatacattaaaaatcaagcatttaatttgtaaaccttaatgaaataacagcctactccagttt

SEQ ID NO: 138 - DNA, 533 bp, Homo sapiens
ccagacaatgaatgagaagcaactcttccatgggacagatgccggctccgtgccacacgtcaatcgaaatggctttaaccgcagctatgccggaaagaatgctgtggcatatggaaagggaacctattttgctgtcaatgccaattattctgccaatgatacgtactccagaccagatgcaaatgggagaaagcatgtgtattatgtgcgagtacttactggaatctatacacatggaaatcattcattaattgtgcctccttcaaagaaccctcaaaatcctactgacctgtatgacactgtcacagataatgtgcaccatccaagtttatttgtggcattttatgactaccaagcatacccagagtaccttattacgtttagaaaataacactttggtatccttcccacaaaattattctccatttgtacatatctagttgtaaaacaagttttagctttttttttaattcctcttaacagatttttctaatatccaaggatcattctttgtcgctgcagtcagtctttct

SEQ ID NO: 139 - DNA, 447 bp, Homo sapiens
  misc_feature 313, 412: n = A,T,C or G
aaggtgctccttgccgccgccctcatcgcggggtccgtcttcttcctgctgctgccgggaccttctgcggccgatgagaagaagaaggggcccaaagtcaccgtcaaggtgtattttgacctacgaattggagatgaagatgtaggccgggtgatctttggtctcttcggatagactgttccaaaaacagtggataattttgtggccttagctacaggagagaaaggatttggctacaaaaacagcaaattccatcgtgtaatcaaggacttcatgatccagggcggagacttcaccaggggagatggcacangaggaaagagcatctacggtgagcgcttccccgatgagaactttgccaaacaccacatgcttgccatctagccaggctgtcttgactgtcgtgatgaanaactgggagcccgttggtgtctttgcctgcgttgg

SEQ ID NO: 140 - DNA, 397 bp, Homo sapiens
aaatgcattttatttttagacaacctacatgacatgtttttcttaaaaacaatgcctccactccaaataaatcacagtcaaaataaatgaagagctcaagatgacatcagtcccatttgtcttaagtcctggtgttgtgtggatgacaagcagaagccagttatgatgacaggtgatagatccaaaataattgccacatttgttaacatttttccatttctaaaccatccttaaagaaaatcatatatggggtcacaccatcctcacggtagtccaatagagcaaccatgccatctggattcatgttttcaccaataaagaactggtagtttttgaaattagcaaggatgtgcttgatttgttctgcagcccctgtcataaaaggttttactctttc

SEQ ID NO: 141 - DNA, 358 bp, Homo sapiens
atcaagcacatccttgctaatttcaaaaactaccagttctttattggtgaaaacatgaatccagatggcatggttgctctattggactaccgtgaggatggtgtgaccccatatatgattttctttaaggatggtttagaaatggaaaaatgttaacaaatgtggcaattattttggatctatcacctgtcatcataactggcttctgcttgtcatccacacaacaccaggacttaagacaaatgggactgatgtcatcttgagctcttcatttattttgactgtgatttatttggagtggaggcattgtttttaagaaaaacatgtcatgtaggttgtctaaaaataaaatgcattt

SEQ ID NO: 142 - DNA, 536 bp, Homo sapiens
  misc_feature 526, 529: n = A,T,C or G
ctgcttccattggtgggtcatttttgctgtcaccagcaacgttgccacgacgaacatccttgacagacacattcttgacattgaagcccacattgtccccaggaagagcttcactcaaagcttcatggtgcatttcgacagattttacttccgttgtaacgttgactggagcaaaggtgaccaccataccgggtttgagaacaccagtctccactcggccaacaggaacagtaccaataccaccaattttgtagacatcctggagaggcaggcgcaagggcttgtcagttggacgagttggtggtaggatgcagtccagagcctcaagcagcgtggttccactggcattgccatccttacgggtgactttccatcccttgaaccaaggcatgttagcacttggctccagcatgttgtcaccattccaaccagaaattggcacaaatgctactgtgtcggggttgtagccaattttcttaatgtaaagtgctgacttccttaacaatttcctcatatctcttctggntgnagggggg

SEQ ID NO: 143 - DNA, 375 bp, Homo sapiens
aaataaaatatgcttattaaacactcctgcaaagatggttttattagtaccctggtcattttgttcaaggaagggttatattgcattctcacgtgaaatataaaaagcaagtcttgcccaataaaaacgctacattgtgtgtattttttgttcagctaagaattggaaaagtatttgcttgccttttaagttactgacatcagcttccaccagtgtaaaaattgagtaaaacctgaagttttgcataaaatgcaaatcggtgcctgtgcttgaaggttgctgtagagcatctgaccccttattaccaccttaagcaatgtatatgccatgcattaccatgcactaattcaatcacaggtgtttctatctagattt

SEQ ID NO: 144 - DNA, 421 bp, Homo sapiens
aaagatcaacttttattgtaacaaatataaagtcatcaatgttttacaaattgtcaaaaatgctttaagtacaaaaaaatacattagtaaaatgaaagttatgttgtattatttggtatacacttaatactgccaacatgcataacacatgccagaaaagctcatgcattattggaagagaaaagaaatgtgatgtaactgctatattgtctgattataaattcattgcttcagtcagttttctttcttcagggataccatttacctgcaatgtgtaagaatgaatatgggcaggagttagtcagggcatggatacttttagattttgagcaaagcaaattatggcaaggagaaagtttccatcttcttaatacaatgtaaaataattacattgcattatttctctgtatttggttttttt

SEQ ID NO: 145 - DNA, 342 bp, Homo sapiens
aaaacatccaaagcccagttaaatttggtgccagaaactgaggcaatggaaaaagctgttgatagcctcacgaatcttaaccctgtcacttgggttaaaaccattggaaattccactattgcaaattttgtattaatccttgtatgtctgtcctctctattgttagtctacaggtgtatccagcagctccggagagacagcggctagcgagaacggaccatgatgatgatggcggttttgtcaaaaagaaaagggggatatgtagggaaaagagagagagatcagactgttactgtgtctatgtagaaagggaagacataagagactccattttgaaaaagg

SEQ ID NO: 146 - DNA, 127 bp, Homo sapiens
  misc_feature 15, 32, 48, 50, 55, 62, 68, 74, 76, 80, 84, 93, 99, 101,106, 110, 114, 120, 122: n = A,T,C or G
tgtaaatacggaacntcacctaataagggggnccggaaatttgggggncnccctnctttagnaatggnccaatngncctnccgnagaccgggnctccgncnccagnttgntggnaatggngnaatta

SEQ ID NO: 147 - DNA, 278 bp, Homo sapiens
  misc_feature 81, 88, 97, 133, 159: n = A,T,C or G
cgaagacctttgctctgctgctgctgtccctgttcctggcagtgggactaggagagaagaaagagggtcacttcagcactntcccctncctgcctgntggatctcatgctaaggtgagcagccctcaacctcnaggccccaggtacgcggaagggactntcatcagtgactacagtattgccatggacaagattcaccaacaagactttgtgaactggctgctggcccaaaaggggaagaagaatgactggaaacacaacatcacccagagggaggct

SEQ ID NO: 148 - DNA, 538 bp, Homo sapiens
  misc_feature 132: n = A,T,C or G
ccaatactcccatttggttttactggcggcatttgattgtattgatgatactaagcttgtgaagcagataatcatatcagaaattatcagttcattgcctagcatagtaaatgacaaatatggaaggaaggncctattgtacttactaagccccagagatcctgcacatacagtacgagaaatcattgaagttctgcaaaaaggagatggaaatgcacacagtaagaaagatacagaggtccgcagacgggagctcctagaatccatttctccagctttgttaagctacctgcaagaacacgcccaagaagtggtgctagataagtctgcgtgtgtgttggtgtctgacattctgggatctgccactggagacgttcagcctaccatgaatgccatcgccagcttggcagcaacaggactgcatcctggtggcaaggacggagagcttcacattgcagaacatcctgcaggacatctagttctgaagtggttaatagagtagataaaaagatgaaagaaaatggggagagaaggttgg

SEQ ID NO: 149 - DNA, 121 bp, Homo sapiens
  misc_feature 6, 14, 29, 35, 42, 50, 55, 56, 70, 88, 93, 95, 106, 107, 117: n = A,T,C or G
tccaantctcgggncgggggccctcaaantatccntatggancaaggtgntgtannatctaccctatctntcaggataacgatcaacntttananctcatctactnntttcctacantatc

SEQ ID NO: 150 - DNA, 537 bp, Homo sapiens
ctggccaacggggccctcaaagtctccgtctggagtaaggtgctgcggagcgacgcggcctgggaggataaggatgaatttttagatgtgatctactggttccgacagatcattgctgtggtcctgggtgtcatttggggagttttgccattacgagggttcttgggaatagcaggattctgcctgatcaatgcaggagtcctgtacctctacttcagcaattacctacagattgatgaggaagaatatggtggcacgtgggagctcacgaaggaagggtttatgacctcttttgccttgttcatggtcatttggatcatcttttacactgccatccattatgactgatggtgtacagctcccaagtgctccctatccagtccaaaggaccctcttgattacagcacaaggaacttgatcgttggggaaccccaccccttggaacttggaagaccctgtttcctggaccgcgaatcagtgtggttgggcatcaagtgttttcttgcaagggttgtgacctgaaacttttacctgccg

SEQ ID NO: 151 - DNA, 384 bp, Homo sapiens
aaaagaaatcatggtacttcttagagcaatttgcaaaaggggaaaaaagtcttaggctcactccttggaaataaatatcaagtaaccataaaaatattcagccatttttcagttattcggggagttcaggcatggtcccacgcagagcatcagagttcctctttgaaataacccagctttgccaatgacatctcttttctcaactgcataacctcccaaaacatctgatcaacatcctgctgtttcacgagtccctgctgaatgtatcgaatgtatgtaaaaaagttacatacagaagtgatcctgtatctgcaaaaaggagaaatataataatagttgcttgagtcccctaatttaattctgtgtttacaggacttactctgg

SEQ ID NO: 152 - DNA, 375 bp, Homo sapiens
  misc_feature 351: n = A,T,C or G
ccaactcagcttttgtggagcgagtgcggaaacggggcttcgaggtggtatatatgaccgagcccattgacgagtactgtgtgcagcagctcaaggaatttgatgggaagagcctggtctcagttaccaaggagggtctggagctgcctgaggatgaggaggagaagaagaagatggaagagagcaaggcaaagtttgagaacctctgcaagctcatgaaagaaatcttagataagaaggttgagaaggtgacaatctccaatagacttgtgtcttcaccttgctgcattgtgaccagcacctacggctggacagccaatatggagcggatcatgaaagcccaggcacttngggacaactccaccatgggctata

SEQ ID NO: 153 - DNA, 289 bp, Homo sapiens
ccagagcatctcgtgtggaccatctaggctccttgggcttcaagcaggacctgagccacatgctccctgtacgagctgtgctatacctgtcccacatgagcacggagagcctcatgttggtgggtttccagagtgatgtgaaagcctctcaccccaatcctcggagactgagttccacaacttttttagtagctcatagtgttatttttctactctcttcatgaaactaactttattttataataaatatatattttctgtcaaaaaaaaaaaaaaaaaaaaaaaaaaa

SEQ ID NO: 154 - DNA, 73 bp, Homo sapiens
  misc_feature 5, 14, 29, 37, 44, 54: n = A,T,C or G
tcctngagtcatanctgtttcctgtgggncatatatntgcatcngtggagcggnccgccattgcgatggatat

SEQ ID NO: 155 - DNA, 421 bp, Homo sapiens
  misc_feature 4, 12, 17, 46, 71, 76, 104, 116, 126, 129, 149: n = A,T,C or G
cttnagacaaangactnaaaacactcttttaatgcaagcctgaatnttcaagcacataaaatctttctttnttaancttaatttcaacatcactggaataaatncctatcgttaanccctgatatncantcttaaccacttgcagccantgttcatgaggcaaaacgtgacccaccagactttgttcaagttctcctcctagggcgtctacattcacggcggtcactccgtttctgtctccttttgtttggcacctgtcagtggatggaagatgaaagtttcaaagctcatggtaacagcagggttctctaccccaggggtttctacctgtgtctggcagtgccttaggaggatgatccagaggcttcggaggagggcgacgtgggaaggagcaggtagcccaagctcccatctcccaccc

SEQ ID NO: 156 - DNA, 339 bp, Homo sapiens
ctgagcaaaggacagtcttacagcgtcaatgtcaccttcaccagcaatattcagtctaaaagcagcaaggccgtggtgcatggcatcctgatgggcgtcccagttccctttcccattcctgagcctgatggttgtaagagtggaattaactgccctatccaaaaagacaagacctatagctacctgaataaactaccagtgaaaagcgaatatccctctataaaactggtggtggagtggcaacttcaggatgacaaaaaccaaagtctcttctgctgggaaatcccagtacagatcgtttctcatctctaagtgcctcattgagttcggtgcatctgg

SEQ ID NO: 157 - DNA, 346 bp, Homo sapiens
ccagccctcctgtcttctccccgtaccttgtagttagaccgaggtgagaatcctgctgaccccagtcccatcccctctcatttcaggaaaacccttttgtgattcaggtagggggagaggaggagttaagggctccgtttactcccaagtcatggatttttaatattccatttttatcactaatatacctctcttcctagaagctactggagtattgagtgttgtgggaaaaggctaactgtgaattaagttaatgtttttcttataagaaatggaagtttatttttttattgatattactatgtgatgaactgagtatgcatatactgaaatggaaggaaatttt

SEQ ID NO: 158 - DNA, 534 bp, Homo sapiens
  misc_feature 501: n = A,T,C or G
aaacaaggtttccccatgaagcagggtgtcttgacccatggccgtgtccgcctgctactgagtaaggggcattcctgttacagaccaaggagaactggagaaagaaagagaaaatcagttcgtggttgcattgtggatgcaaatctgagcgttctcaacttggttattgtaaaaaaaggagagaaggatattcctggactgactgatactacagtgcctcgccgcctgggccccaaaagagctagcagaatccgcaaacttttcaatctctctaaagaagatgatgtccgccagtatgttgtaagaaagcccttaaataaagaaggtaagaaacctaggaccaaagcacccaagattcagcgtcttgttactccacgtgtcctgcagcacaaacggcggcgtattgctctgaagaagcagcgtaccaagaaaaataaagaagaggctgcagaatatgctaaacttttggacctcgggcgcgaccacgctaagggcgaattncagcacacttggggggcgttctagtgggatccc

SEQ ID NO: 159 - DNA, 419 bp, Homo sapiens
gcgagcgtctgggcgggtggtaggaacaatggcgctgtcttaagtggcacagtggagcagctctgaagatgcaaagatacacgaaaaaacttccagaacatctgggagaatatttaatggaaaatcgcttggttaaaacctgacacttttaacagtgaacagcgttctgagtgtggacgagtagccagtgaagataatgaatgtcgaatgtgactgactagcagcttcattttgaatgagggtcgctgtctgcccattgatagaggccagattgtcttggaagttccaaagttgcaacgatttctggctagtgccacgaggtttacttgactgttgtgtgaaaagctgataagaaaaccatccagaaaaaagctcttcgttttacaaacatgaaaataaaacatgtaattttggattac

SEQ ID NO: 160 - DNA, 541 bp, Homo sapiens
gggatcgcaaggctgaggatgccaggagggactatgaaaaagccatgaaagaatatgaggggggccgaggcgagtcttctaagagggacaagtcaaagaagaagaagaaagtaaaggtaaagatggaaaagaaatccacgccctctaggggctcatcatccaagtcgtcctcaaggcagctaagcgagagcttcaagagcaaagagtttgtgtctagtgatgagagctcttcgggagagaacaagagcaaaaagaagaggaggaggagcgaggactctgaagaagaagaactagccagtactccccccagctcagaggactcagcgtcaggatccgatgagtagaaacggaggaaggttctctttgcgcttgccttctcacaccccccgactccccacccatattttggtaccagtttctcctcatgaaatgcagtccctggattctgtgccatctgaacatgctctcctgttggtgtgtatgtcactagggcagtggggagacgtcttaactctgctgcttcccaaggatggctgtttat

SEQ ID NO: 161 - DNA, 293 bp, Homo sapiens
ccaccgacagacctgggctcaaattggacctgctgcttttgactgtgagaccttccataagctccttttgctccaagcctcagttttctcctctgtgaaacagagaaaatcgttcctatcagagttcttatgaggatgaaatgggattttggatgtaaaatgcttccatccagtacctgctaaacaaaatgcttactaatggccgggcgcggtggctcacgcctgtaatcccagcactttgggaggctgaggcgggcggatcgcttgaggtcaggagttcgagaccagcctgg

SEQ ID NO: 162 - DNA, 536 bp, Homo sapiens
  misc_feature 458, 528: n = A,T,C or G
aaaactgcaagcaccatgcggttcatacaatcttgttattactgttaatttatcaactaatacaaactcaaaaatgcatccggccagcagcgccagcaatttcaaatgggaacttaaaaatacacttttattttggtatttttgtcagtgcaacttaaatccttttactgacctgcagaaaaaaaaagtaataataaagaaaaacacccatatcttccctataactactatacaactgaagaattgaaggggggggacaccaccaagaactcttcctactatctcaaaagcagggaaagaaacgcaatgcattggtctaaagaacgcacttgaaagttgcaaaattacttgccaatgtttgggtttctggtacattctgagcatagcagttggttcagtgcagtgtctgcttaccagtgcactgccagggtcagggatggctaagcctctcaccctangagcgctgtggctcctacaattagcgcaggcccagagggttcagaagggacctcagggtgattctggttncataaaaa

SEQ ID NO: 163 - DNA, 533 bp, Homo sapiens
gagcccacaggggaagagcagcggaaggggcctttcggaacgatttggaatgaaaggaagtggaagaaacgcggaaccatggccgctgtggttgctgtttgcggtggtctagggaggaagaagttgacacacttggtaacggctgctgtcagccttacacatcccgggactcacacggtgctttggagaagaggttgttcacaacaggtatccagcaatgaggacctgcccatttcaatggaaaatccttataaagaacctcttaagaaatgtatcttgtgtggaaagcatgtagattataagaatgtacagcttttgtcccagtttgtttctccatttactggatgcatttatggaaggcacattacaggtctttgtgggaagaaacagaaagaaatcacaaaagcaattaagagagctcaaataatggggtttatgccagttacatacaaggatcctgcatatctcaaggaccctaaagtttgtaacatcagatatcgggaataaattctatcacgttccctaataaactt

SEQ ID NO: 164 - DNA, 331 bp, Homo sapiens
ccagaccattggctaggacctggctgtattttccatcctttacatccttctgtctgttcaagaaccagtctgggatcttgtactggcgtggattctgcataatggtgatcacacgttccacctcatcctcagtgagttctcccgccctcttggtgaggtcaatgtctgctttcctcaacaccacatgagcatatcttcggcccacacccttaatggcagtgatggcaaaggctattttccgccgcccatcgatgttggtgttgagtactcgcaaaatatgctggaacttttcagggatcactagagacatggctgcagcacaagcggcggc

SEQ ID NO: 165 - DNA, 200 bp, Homo sapiens
ccacctggaaccaccctgtcctgtctgtttacatttcactatcaggttttctctgggcattacgatttgttcccctacaacagtgacctgtgcattctgctgtggcctgctgtgtctgcaggtggctctcagcgaggtacggggagggcgtcaccctgcagaacggcagagtgacgcgtcctctcgctgctgagcaccag

SEQ ID NO: 166 - DNA, 533 bp, Homo sapiens
  misc_feature 424, 455, 480, 495, 496, 505, 506, 513, 523, 531: n = A,T,C or G
ctggtggttaacaagtggatcgtcatgttcagtagtttatacattatgtgagaagtaacgttctgattctttttcttacacagaattggcagagggggtcgatttgggaggaaaggtgtggctataaactttgttactgaagaagacaagaggattcttcgtgacattgagactttctacaatactacagtggaggagatgcccatgaatgtggctgaccttatttaattcctgggatgagagttttggatgcagtgctcgctgttgctgaataggcgatcacaacgtgcattgtgcttctttctttgggaatatttgaatcttgtctcaatgctcataacggatcagaaatacagattttgatagcaaagcgacgttagtcgtgagctcttgtgaggaaagtcattggctttatcctctttanagttagactgttggggtgggtataaaagatngggtttgtaaaactttctttcttanaaatttatttcctanntctgtacanntggttgnttagatgtcnctatcatntc

SEQ ID NO: 167 - DNA, 636 bp, Homo sapiens
  misc_feature 474, 510, 520, 565, 577, 586, 595, 603, 604, 610, 623, 626,631: n = A,T,C or G
ccttccagcaccgttctgtgtcctggtcgcagttcaacaaggagatcctgctgggccgtggcttcaccttttggcagtggtttgatggtgtcctggacctcaccaaacgctgtctccggagctactggtctgaccggctgatcattggcttcatcagcaaacagtaccgttactagccttcttctcaatgagcccgacggaacctttctcctccgcttcagcgactcagagattgggggcatcaccattgcccatgtcatccggggccaggatggctctccacagatagagaacatccagccattctctgccaaagacctgtccattcgctcactgggggaccgaatccgggatcttgctcagctcaaaaatctctatccccaagaagcccaaggatgaggctttccggagccactacaagcctgaacaagatgggtaaggatggcaggggttatgtccagctaccatcaagangaccgtgggaaagggaccaacccactttctaccccnaacttcagangcctaccatgggggccttcttattacctttggaaaggcccctganttcctccatgancattccagnttggcccanaaattggnnccccanggggaccccaccncanttttnctcct

SEQ ID NO: 168 - DNA, 93 bp, Homo sapiens
  misc_feature 59, 74, 76, 85: n = A,T,C or G
ccttccagcaccgttctgtgtcctggtcgcagttcaacaaggagatcctgttgggccgntttttcacctttttncntctttttantgcgcttt

SEQ ID NO: 169 - DNA, 479 bp, Homo sapiens
  misc_feature 130, 146, 157, 162, 222, 223, 272, 304, 308, 316, 317, 340,342, 349, 378, 405, 409, 423, 433, 434, 438, 446, 449, 467,470: n = A,T,C or G
caaaaggtgactagacatacttggaagttcaaagcagtaggatgtagcttgcagggaaaagaaaacccttttccatgttgttaggcagaagtatatcaaatatatcccaattccacttgataaagtcagnttggatgacctccttnaaccaatctanggcanaacacttagtaaaagcgggccctgggtggggatgtgaatccaggagaagaggggcaccannatcccatgcagcgccaaacacatccattccaccctctaacacatacgangcatgtcaccccattgccctggacacaagatntacnataacagnnagctaatgggcactgctcccacngnctggggntttctaatgggctttaaaattcaaggccntggaaaaaaatccttttaccccccaancacnaaacttggcctttngacctttccnncatnacaggatnttntggggggaaaattctttnggntccccatac

SEQ ID NO: 170 - DNA, 315 bp, Homo sapiens
  misc_feature 72, 118, 120, 125, 128, 130, 138, 154, 155, 162, 175, 176,190, 194, 214, 250, 262, 269, 291, 293, 309: n = A,T,C or G
aaattgctacgtcagtacaccaaggagtctagtgatctacatgactacatgaaaagcttgaattatacctgngatccaatctccagctcactgaatcagtggcggggaagggaaaaananaaaangangnaaaaaganagatttcattaatagnnccttttnaaactccaaaatnntctgcatttaagcncatncaatcaggtaccttaaagangaccatttttgttctttgcaatttgtataccagaancactccttccanactcacntgaatttatttccttcccaatncntgacaatgcccttggncttgaa

SEQ ID NO: 171 - DNA, 625 bp, Homo sapiens
  misc_feature 41, 203, 288, 308, 401, 403, 415, 470, 490, 531, 535, 540,547, 556, 560, 563, 577, 587, 599, 600, 604, 612, 613, 624: n = A,T,C or G
aaattatttcactgaagctgagattattagtgatacaaagntaaaatttcaatatttaatttctctatatattattaatattaaattgttttttacttataaattcatgttctcatctgatttaatattaaatttgtataggtgggcgtttcttaccattttgcacaagtttttgtttttctgaaacacttaattgtgcaggntgtaaaaaagattagtgcattttcattttaaggatgctttgctccttaaattgttcgacagaaatgactttttagggaaagtagnttttttggagctactaactngtatttattattgtacatgcataaccagggtggtgagggcactaatcttgtaggaaacacttacttgatgttttatttgaacttttcctatangntaacttttctgnatagaattaacactaggaacagtgtcatgaaatctgggttgaaggagaatacagnatatatgagaaccttaaagntcaaataggaaatcatttctgaagacaaaaccagaggaatnttgntcagngcccacntaatgggangaanaangggcggcatttacnctgggcaagnatttgagaagannggcntaaagaanngggaacttacnt

SEQ ID NO: 172 - DNA, 632 bp, Homo sapiens
  misc_feature 95, 305, 338, 340, 437, 487, 496, 513, 520, 530, 552, 604: n = A,T,C or G
cctggcttcttcgggatgctccagaacaaaggactaacagactactgctttgactataaccctcccgatgaaaaccagattgtgggacaccaggncattctgtacctctgtcatgggatgggccagaatcaagtttttcgagtacacttcccagaaagaaatacgctataacacccaccagcctgagggctgcattgctgtggaagcaggaatggatacccttaccatgcatctctgcgaagaaactgccccagagaatcagaagttcatcttgcaggaggatggatctttatttcacgaacagnccaagaaatgtgtccaggctgcgaggaacgagncnagtgacagtttcgttccactcttacgagactgcaccaactcggatcatcagaaatggttcttcaaagagcgcatgttatgaagcctcgtgtatcaangagcccatcgaaggagactgtggagccaggatctgcccaacaaagacttnctaacaagngaccagaaacccaccanaaactanggttgtattncttttgaagaagcaatcatttngccttttgtgaaagtgtggttggatttaattaaaaaaggggaataaactttnggactttttttggaaaacttttttacct

SEQ ID NO: 173 - DNA, 271 bp, Homo sapiens
gaactagccaacttaagaattacaggaagaaagtggtttggaagacagccaaagaaataaaagcagattaaattgtatcaggtacattccagcctgttggcaactccataaaaacatttcagattttaatcccgaatttagctaatgagactggatttttgttttttatgttgtgtgtcacagagctaaaaactcagttcccaaatccccagtttatgcagcgccatcaggtattttaagctaaacttcttcacccctgagagcatgtcag

SEQ ID NO: 174 - DNA, 311 bp, Homo sapiens
  misc_feature 116: n = A,T,C or G
atattttccaatttgctgggatgtcacctagcaatagcttggattatatagaaagtaaactgtggtcaatacttgcatttaattagacgaaacggggagtaattatgacacgaagnacttatgtttatttcttagtgagctggattatcttgaacctgtgctattaaatggaaatttccatacatcttccccatactattttttataaaagagcctattcaatagctcagaggttgaactctggttaaacaagataatatgttattaataaaaatagaagaagaaagaataaagcttagtcctgtgtcttt

SEQ ID NO: 175 - DNA, 307 bp, Homo sapiens
  misc_feature 77, 120, 154, 169, 202, 218, 267, 274, 276, 282, 290: n = A,T,C or G
ttggtgcagaaagtgagattgaaatgtagtttctttgcaggttatattcccagaggatgtcagtcccaaggaccagnagctgccatcagtttggattctgaaaactaactggcatcaacnctgggtgtagaaacatgcttgccttatgtatcanaggacatgctcagcngatccaagagatatatttggcaactttttctanaaaaggcacattgggnatcattcattacattcttgagtttttttgggtttttttttttttttttnaaaacancnttgttntttccccngggtgggaggggggggg

SEQ ID NO: 176 - DNA, 355 bp, Homo sapiens
  misc_feature 183: n = A,T,C or G
aaaaacaaaaacagaatgttgtacgtgaagattctaggaggggagggaccagcaaatctgagagaaccgtcctggggcctcccttcgaggagccctctgatgtgaggagggacttgagttgagtgacgcttgtggtgtgaggtgttctgagctcactgaccggaaggtccaggtgaatctcgncataagtgatctcaggctctcacaggatccggagggaaatgtgttagagggtctggaaaattcagtgcttttgagttacttgtttttattaaaaatttcctcacaaaagagagtcctcaagttgtggctgttcttgggaaaggggtcaccgtgtctgacaaagtgtaacttt

SEQ ID NO: 177 - DNA, 469 bp, Homo sapiens
  misc_feature 28, 103, 109, 137, 143, 167, 189, 192, 200, 213, 256, 270,279, 284, 326, 337, 349, 363, 372, 373, 378, 387, 393, 417,423, 434, 438, 440, 444, 450, 461: n = A,T,C or G
cctgggctgggaaaaactttggaaccanactcttgcctgtttcccaggcccactgtgcctcagagaccagggctccagcccctcttggagaagctcagctaanctcacngtcctgagaaagctcaaaggtttggaangagcanaaaacccttgggcctgaagtaccngactacatggacctgccttgcntangagtttgnaggaagttggagntttgttttcctctgttcaaagctgtctgttcctaccccatggngctaggaagaggantggggtggngtcanaccctggaggccctcaaccctgttctccccgagctcctcttncatgctgtgcncccatggctggnacgaacgacttctncttctgttnnccgtnctgtaaaanagtagntttttgttcaatttaatgcttgtnccatgngtgaatacgangggnangagnaacctnctctgagctcntcttttaa

SEQ ID NO: 178 - DNA, 518 bp, Homo sapiens
  misc_feature 125, 147, 182, 232, 354, 438, 446, 463, 468, 481, 501, 512: n = A,T,C or G
ctggtgcggggccctgcagatgggaccatctcaggctgggtccttgtagcccaggagcacagactggactaagcctcctgggccttgtatgaaaaaggtgttgtacctggccgtttttgccagtnataatcaataaaataaccatantaaaaatcaaaggctctgttctgaccactcttcangtcttccgctgaaacggaaaagtgcaaagcaattgaagtacatatgcagnttgtcttaacctcaaatagtgccagtcccacttctttcctctgatagtttgttcaagctcagcaagatgcagaggggctggcctgttctccttttgatttcctccacaaggacttctcttcngacatccacctcttccctgctcgcactgaacggagcttgatgaccccatccttgagttccttgctccccgatgatagccaccancgggatgncctgccttctcacaagnactgnactggttcagcanctttgggttctctttgtcanacctcaacctnatccat

SEQ ID NO: 179 - DNA, 407 bp, Homo sapiens
  misc_feature 61, 68, 94, 105, 110, 121, 149, 160, 187, 191, 248, 275,317, 336, 339, 355, 360, 373, 385, 394: n = A,T,C or G
ccatgctcacccagccaggcccgtagtgcttcagtttgaagatctcatcggggaagcgctnaccgtanatgctctttcctcctgtgccatctcncctggtgaagnctccncccctggattnatgaagcccttgattacaccaatggaantttgcttgttntttggagccaaaatcctttctctcctngtanctaaggccacaaaacttatccactgttttttggaacagtctttccgaagagaccaangatcacccggcctacatcttcatctcnaattcgctatgtcaaaatacaccttgacggcgactttgggcnccttcttcttctcatccgncgnaaaaggtccacctccngctcncgaccacgctaanggcgaatttcanccacactgngtgggacgatact

SEQ ID NO: 180 - DNA, 505 bp, Homo sapiens
  misc_feature 473, 491: n = A,T,C or G
aaaaatgtaacaaacatctaaatatctgacaataaaatctgaaatgctgtaacttcaacattaactgcaccatccaaattcttgtgacttacgcatttttgcccaatttaacctttctgatgttcccctgcccccagacaccataaatgcattgtaattttgaaaatatctgccaactacacactgaaaattttaacccgatcaattgacataatataaaatctgtcccaaagcactgaaacaagaaaatctataccatcatgctacagacgtacttagaaaacttaaaaggaagagtaaatatcagctcagtgatttataatgaagctaataaaattcaggccagtattcttaagtgtaatgaacattatttgaacattcaacacatgaaaggttaacaaaggctatgaacttggtgtaacttaaaacgtttcagatgtcggagttcacccagatgtaattgggattcaggngggatcccgccgacctcngcccgcgaccacgc

SEQ ID NO: 181 - DNA, 441 bp, Homo sapiens
  misc_feature 275, 292, 306, 356: n = A,T,C or G
aaaatgtaaaaattaatcgaatatctatgaaagggcacaggaagctagatattttaaggaaggaaggtacgctacttacaaagttaacttgtaaccacacaggaggggtaaagattctagagaagagcactttggttaactctatacgctctgtggctctacccattcataaacgagtctctatgcataaatgagtcaccaatagttaagattaccaaatatatttcaaacctaaaattaaattatccaagttgtggtccctttattcaaatggnaagtatatccatgcacngaagtccaaatatnttaaaaggaattaaaattaaattgcatatatcatattccttcaatagttngagggctattgcttttaacaagattagtattattccattttaatacgtcaggagtacataaacacaagtacacctgaaatacacc

SEQ ID NO: 182 - DNA, 387 bp, Homo sapiens
  misc_feature 203, 285, 332, 380, 382: n = A,T,C or G
ggctcacattgcatgcaagtttgctgagctgaaggaaaagattgatcgccgttctggtaaaaagctggaagatggccctaaattcttgaagtctggtgatgctgccattgttgatatggctcctggcaagcccatgtgtgttgagagcttctcagactatccacctttgggtcgctttgctgtcgtgatatgagacagacagntgcggtgggtgtcatcaaagcagtggacaagaaggctgctggagctggcaaggtcaccaagtctgcccagaaagctcataangctaaatgaatattatccctaatacctgccaccccactcttaatcantggtggaagaacggtctcagaactgttttgtttcaattggacctcggncncgacc

SEQ ID NO: 183 - DNA, 403 bp, Homo sapiens
  misc_feature 60, 63, 85, 111, 112, 120, 123, 160, 163, 252, 258, 265,271, 282, 294, 319, 340, 343, 344, 369: n = A,T,C or G
aaaacgcctacaaacagccttttttttttaggcaacaaaatacgtccagtccttgacatnttntcatactcacctagcaccacanatgcaaggacctaacagtaaacatgnncaatctcntgnttaaccctaaagcatgcactgaattgaatttgtttgntgngatctatcctactaagaatgcaatacatactttttcttactaatattttatacattaaattaccctgcagcattttgaaattttaacantgatgnaaaacancttttnaaagatttatnaaacaagtttcnaggttcaccttcaggctggtttggntaagtggaaaaatggcagcanccnnaaggttcatactgaatgaaaatggngttgggtgcatgtcaacccatgtaaaaaatacct

SEQ ID NO: 184 - DNA, 341 bp, Homo sapiens
  misc_feature 85, 164, 186, 191, 208, 234, 244, 260, 272, 318: n = A,T,C or G
ctggaggatgcatttctgaccccatcccagacacgtgaaagcagaagacatgatgcatctataataatgaaagcacaatctaaanagtattatcacaccgtgaacagcctcttcctgacccacagcaaatattaagagaaagacattttatttacaaacaaganttaataatgctcacaagaatanagttngcccccaaatggaaaantacacattattttgtttcaaaaagcnataaatttantgcttgaaaaatccancaggtaagcatnaaggactaacagggtctgttcctggaactgtccgccagcaaatgancatgctcttgtcctgggaagcca

SEQ ID NO: 185 - DNA, 381 bp, Homo sapiens
  misc_feature 32, 103, 109, 125, 127, 151, 158, 217, 260, 298, 301, 319,321, 334, 364, 375, 378: n = A,T,C or G
aaaattgaaactgatggaacattctttcttgntcttcaccatctgacaaattgaatggcaagaggcggattttgccagtttcttttcactgatgcagatttgngttaanatagctctgaatggangntttataaactggccctgagcatcnataaagnatcagtatctgacctttttttaaccttctaggaatttgaaataaatgtgtttgtgttgnctgattagatgatcattggtgtcttgccacaatgtttaccttngccgccgacacgctaagggcgaattccagcacactggnggncgtactattggatctacntnggtccaacttgcntaaacatggcatatctgttctgtgaacacncccttccttcnttnttt

SEQ ID NO: 186 - DNA, 136 bp, Homo sapiens
  misc_feature 76, 105, 117, 126: n = A,T,C or G
ccactttattccatataacacttaaccagatatcatttacatctgaggaagagatggcccatgagactgatctatngcaaaacactctaagaaatgcagtccaantttatacacttncaggcattncctagacaaa

SEQ ID NO: 187 - DNA, 553 bp, Homo sapiens
  misc_feature 168, 291, 296, 321, 369, 398, 415, 422, 447, 468, 487, 491,492, 499, 502, 507, 516, 528: n = A,T,C or G
aaaaagagcacattccattctggtgcacacaaatgtacattaaaaataaaataaaaaagtgtaagagtacatttcaagggaatccctgcctctcccttggctcgctggcaaatgattcacaaccaaaacatttctgggatatgtgacttaaggaataaaaaaactcangtgttttataaaagggaatggcaggatgaggaaatgatttatcaagatacaattttactaataattacttctcaaataacttaaaaatgttttataacaaaaaatcaaaatgaaacaaaactnggtangttgaatataagtattttcaactgntacaatacttgaggagatttttcggcctaatttctcagaaactcgccnaaagaatagctattctttacacagaatancttaaaaatttccatgnggaagcnattattttaggaattccaaaacttntttttttcaaaatgacatacntaatttccttgaaaatttnttgnnaaagggntcntaaanaattaaacnaaaccctgtccngcgcttttttttttctttttataac

SEQ ID NO: 188 - DNA, 299 bp, Homo sapiens
  misc_feature 62, 72, 104, 119, 167, 175, 185, 201, 205, 224, 265, 282,295: n = A,T,C or G
ccacagaagttgctgctgacgctctgggtgaagaatggaagggttatgtggtccgaatcagnggtgggaacnacaaacaaggtttccccatgaagcagggtgtnttgacccatggccgngtccgcctgctactgagtaagggggcattcctgttacagaccaatganaactgganaaagaaaganaaaatcagttcgtggntgcnttgtggatgcaaatctgancgttctcaacttggttattgtaaaaaaaggagagaaggatnttcctgtactgactganactacagtgcctntcct

SEQ ID NO: 189 - DNA, 598 bp, Homo sapiens
  misc_feature 100, 109, 121, 126, 131, 143, 155, 156, 164, 169, 170, 181,203, 219, 232, 239, 240, 258, 272, 274, 284, 336, 404, 425,427, 432, 443, 453, 467, 476, 477, 496, 508, 515, 528, 532,539, 542, 544, 573, 576, 590: n = A,T,C or G
aaattattgttaaagaatacacaatttggggtattgggatttttctccttttctctgagacattccaccattttaatttttgtaactgcttatttatgtnaaaagggtnatttttacttancttanctatnccagccaatccnattgccttctgnnaaagaaancaccnnaaatccctcangtcccttggtcaggagcctctnaagatttttttgtcanaggctccaaatanaaaatannaaaagggtttcttcattnatggctagagctananttaacttcantttctaggcccctcaagaccaatcatcaactaccattctattccatgctttncacctgcgcattttcttgtttgcccccattcacttttgtcaagaaaaccttggcctcttgctaaaggngtatttgcccctttgacaaancngggancaccctaccanggacactatnactcattctggtgngcaatggtnncaaactataaagactgccntggtgcctaatnccccttngggaaaatgtggncttnttgactnagnangattataacctacggacctggcctggccngcncgtttcaaaggggnaaattccc

SEQ ID NO: 190 - DNA, 323 bp, Homo sapiens
  misc_feature 162, 178, 182, 243: n = A,T,C or G
aaaaaaatcaacagtgttaacagtgggtgggtatgtttccagacctctcaattcactcatatgtacagacaggattgacggggggaatccctaaactttttattctaacaagttttatttatttatttccttttttgacatggagtctcgctctgcgcccanctggagtgcaatggcntggnctcggttcactgcaaccttcgcctcccgggtttaagcaattctcctgcctcagcctcccangtagctgggattacaggtgcatgctacttgcgcccggctaatttatgtattttattagagatggggtttcaccatattgg

SEQ ID NO: 191 - DNA, 621 bp, Homo sapiens
  misc_feature 103, 140, 228, 237, 266, 345, 448, 472, 491, 498, 509, 517,527, 530, 561, 577, 587, 605, 612: n = A,T,C or G
aaaatgttttatttcatagctcataaaaaagcatgtatgtacaagactcaagtaaatagaaaggcagctttcaatcacaaatcagtttttcagattttactgnggaagcatatttaatgcacacatttgaatgttacacntaaataattttaacgatggagtccaagctctggattttacattagatctgcatatataagacacttgtggtcaaatttcaagattggnaaagccagnttcaagctgcttatattttgagtacaggnttcactattacaaatatatgatgttaaactaacaaactcatgaccttcaaagatgtcttcgtcccacgcacacacattngtaatttgtgccatttgctatttccctttcttctataatcttcaaagtatatagttatgcattgagttcctatgcatcttcaccctctcctttatctgaaacnggaaaaagcacagaaaaaaatctnaataatttttcaatctttngtcatcntgaaaatagcnttaaatanaaatgaaatnaangaacacaagaaaatttttcccccattataanacttatttcctgcccngcggccctcnaaaggcgaaatccacacnattgcgnccgttactt

SEQ ID NO: 192 - DNA, 628 bp, Homo sapiens
  misc_feature 353, 423, 451, 458, 463, 513, 523, 546, 551, 583, 591, 604,617, 623: n = A,T,C or G
aaagtacattatgagaacaacagccctttcctgaccatcaccagcatgacccgagtcattgaagtctctcactggggtaatattgctgtggaagaaaatgtggacttaaagcacacaggagctgtgcttaaggggcctttctcacgctatgattaccagagacagccagatagtggaatatcctccatccgttcttttaagaccatccttcctgctgctgcccaggatgtttattaccgggatgagattggcaatgtttctaccagccacctccttattttggatgactctgtagagatggaaatccggcctcgcttccctctctttggcgggtggaagacccattacatcgntggctacaacctcccaagctatgagtacctctataatttgggtgaccacgtatgcactgaaagatgaggnttgtggaccatgtgtttgatgaacaagngatagantctcntgactgtgaagatcatcctgcttgaaggagcccagaacattgaaattganaatccctatnaaaacaatcgtgccccagaaganctggnctacacctatctggacacttttggccgcctgngaatggtngctacaagaaaantttggagaacacncattangacat

SEQ ID NO: 193 - DNA, 395 bp, Homo sapiens
  misc_feature 78, 110, 113, 130, 186, 217, 221, 299, 348, 375: n = A,T,C or G
aaacaaaacaaaaaaaagtttacaaaagaaaaaaagatacagaaaaagaataacttgcttcatatgtcccaaaaaganaaaaaaataaaggggacaatgccaacatgctnaanaataaaggcttcttttncttatttttttaatacaaaatacaagcaaaggatacacatacttaaaacagagctnaggagcagacacgcagtcctggaaacccttnaatnaaagcaaagcaggaggttgttttttctttgtctatgcagatacatacagagactgggatatgtaaaaattaagtatcncaaaagaccatcacacgattctaccaatgcatgttgcatcttgtaattnacgaacatggtcaacaaaatcatgttnacttcaaccccatttcattt

SEQ ID NO: 194 - DNA, 269 bp, Homo sapiens
  misc_feature 166, 171, 195, 250: n = A,T,C or G
aaataatacagaacaattaaagctaaccaagcgcaacagataaataagcctgccagttatacacataactttataccaaccataattcagccagtcaaaattccaaaaacaatccaaataacttcaacatactatgcggtcaaactaccgaataaacttgatgcanaccanctattctcaagttgcaatagtatncaatgactttgctgaaatgcataaaatggacaagcctatgtatctgcgcaaccancaggtttttttttatttta

SEQ ID NO: 195 - DNA, 179 bp, Homo sapiens
  misc_feature 45, 58, 60, 143, 148, 172, 173: n = A,T,C or G
aaacataaaagtgtttgtttctgttatgttaccataatttgatgnatatagtgtccananccatttagaaatttaatatttattaataactgaaactgtttgtcttcctttggtatatagtctcgcatattatattatatcangccangataaaattttgacagctctttannccacat

SEQ ID NO: 196 - DNA, 187 bp, Homo sapiens
  misc_feature 104, 112, 119, 125, 128, 130, 145, 155, 160, 164, 172, 177,179: n = A,T,C or G
cctgggctcgcctggaccacaagtttgacctgatgtatgccaagcgtgcctttgttcactggtacgtgggtgaggggatggaggaaggcgatttttcattaggncccgtgangacatgnctgccnttnanaaagattatgatgangttggacatnatatncctnactgatanagatnanggttaata

SEQ ID NO: 197 - DNA, 76 bp, Homo sapiens
  misc_feature 24, 36, 37, 51, 74: n = A,T,C or G
aacatcctggtgtttgacctgggnggcggaaccttnnatgcgtctcttctnaccattgacaatggatgtattcnaa

SEQ ID NO: 198 - DNA, 170 bp, Homo sapiens
cctatctggttggcctttttgaagacaccaacctgtgtgctatccatgccaaacgtgtaacaattatgccaaaagacatccagctagcacgccgcatacgtggagaacgtgcttaagaatccactatgatgggaaacatttcattctcaaaaaaaaaaaaaaaaaaaatt

SEQ ID NO: 199 - DNA, 626 bp, Homo sapiens
  misc_feature 366, 418, 496, 502, 531, 547, 548, 551, 557, 579, 596, 604,607, 609, 617, 621: n = A,T,C or G
aagacatcccagcacagcatatcacgctgtttcttaagtatttgtatttcctgtacctgaagtgtagcgaaaatgctactatgactcttcctggaatacacccacctaccttgaaccagattatggattggatatgtctacttctggatgcaaattttactgttgttgtaatgatgccagaagcaaagaggctactgataaatctttacaagcttgtaaaatctcagatatctgtttattctgagctcaacaagattgaagtaagttttcgggagctacagaaattaaatcaagaaaagaataatagaggattatattcaattgaagtgctggagctcttctgatattatcaattctccttcatanacattttataaagctcttttatgtgaactcttgcttcatccaggcaagaacngggtttgtttgcgaccatctcagggtcaagagaaacgtgacagtgagtacctggacccttcacttaactgatgctccngggtangactgcaggttcacatgaccctgttctangctgtggaccattggnntgnagaggnctgcaattttttaccttgcccnggcgccgctcaaaaggncgaattcnacnanctgtcggntgtntagcg

SEQ ID NO: 200 - DNA, 313 bp, Homo sapiens
  misc_feature 15, 182, 284: n = A,T,C or G
cttagggagctgcanttgaggaattgtctgcgtatccttatgggggagctctctaatcaccatgaccatcatgatgaattttgccttatgccttgactcctgccatttatcatgagattaatactgtgattcccgctgttttcttttccttgcattttcctaatatgcctttactgatccgnttgctgtgaaccctatgctattccatgtgtcaagtgggccttgtgtctgccagcttctatttgaagattgcctttgcactcagtgtaagtttctgtcagcantagtttcacccatttgcatggaaaaattt

SEQ ID NO: 201 - DNA, 81 bp, Homo sapiens
  misc_feature 47, 50, 61, 71, 76, 79: n = A,T,C or G
ccacagtgaagagggagtaggggactcacccctcctgccttcctgtnccnaagggggctgntcaacctatnacggnganta

SEQ ID NO: 202 - DNA, 115 bp, Homo sapiens
  misc_feature 29, 31, 43, 48, 67, 72, 79, 82, 89, 95, 96, 114: n = A,T,C or G
gctgatcctgtttatttggcaggaaaacnanacaatccagcancccangagggacaggtggacttantcctnctcctcntcnactccanccccanncccaccctggtccttctng

SEQ ID NO: 203 - DNA, 318 bp, Homo sapiens
  misc_feature 6, 18, 42, 72, 83, 97, 102, 117, 119, 128, 143, 144, 152,159, 166, 174, 186, 189, 194, 198, 214, 228, 232, 246, 249,254, 274, 285, 291, 293, 308: n = A,T,C or G
cgaggnctgtattttggntttctccctgtcccttcctttttnccctattctttggcagcttgtatcaaatgntacagtttatnttgtggaataaatncttcncctaacataacactnantgctcattnatttaaaagcttttnnagcacaantttcttntgccccntttactgntgcacactcatnaanggggntgcnttgcttttgcctctgncccaaccacggttncatntatcacttggatgntancctgnaaacaacattatagggattnacactgccttntgcggncnatcataattggcgantttctacaca

SEQ ID NO: 204 - DNA, 274 bp, Homo sapiens
  misc_feature 27, 35, 40, 90, 104, 144, 156, 164, 165, 173, 204, 207, 236,243, 256, 260: n = A,T,C or G
gcctcatacatgccctgaggccagcangcgcccanctcangcaacacacgccttcacttaaaaaggccgaggagcggcgggatccacctnaatccaattacacntggtgaactcccacatcttaaacggtttaagtcacaccanagctcatagccnttgttaanntttcatgngttgaatgttcaaataatgttcattacactnaanaatactggcctgaaaaattatttatcttnattattnaaaacactggagncttnataaaatacttcat

SEQ ID NO: 205 - DNA, 110 bp, Homo sapiens
  misc_feature 38, 53: n = A,T,C or G
ctgtcatcacgtcttccaccacaggaatggagccatangagcaagcctcatanattcgatagcattctgtgtttactccgaccgggcacaatgtgatatcactctgaaaa

SEQ ID NO: 206 - DNA, 153 bp, Homo sapiens
  misc_feature 53, 87, 99, 129, 133, 148: n = A,T,C or G
aaaaacaaaaacagaatgttgtacgtgaagattctaggaggggagggaccagnaaatctgagagaaccgtcctggggcctcccttcnaggagccctctnatgtgaggagggacttgagatgattgacgntgcngagagaggttttctnaaact

SEQ ID NO: 207 - DNA, 150 bp, Homo sapiens
  misc_feature 56, 71, 75, 112, 120, 122, 130, 135, 144: n = A,T,C or G
aaattgtattgaacagggcatataaaatgcattctgtaccctgatctggcatatancttcaaaactgcagnggcnagtgtccatctcttagaatagctaccttaactgtccnccccttantntctgtgcnatccnctctctgcnttgttt

SEQ ID NO: 208 - DNA, 228 bp, Homo sapiens
  misc_feature 18, 70, 75, 100, 105, 108, 110, 119, 125, 128, 135, 137,162, 163, 171, 172, 180, 185, 191, 203, 211, 215, 218: n = A,T,C or G
ccaggggtgctaagcagntggtggtgcaggaggcattgctgatgatcttgaggctgttgtcatacttctnatggntcacacccatgacgaacatgggggnattancananggggcaaanattatnacnccttttncnttcccccctgcacaatgaatacccnngtctcttnncatgcccnggtgnagaganccccccctgtgncttatacntacnttntcttcttccc

SEQ ID NO: 209 - DNA, 505 bp, Homo sapiens
  misc_feature 48, 89, 113, 140, 145, 196, 223, 256, 277, 278, 279, 291,342, 375, 400, 401, 414, 416, 423, 428, 444, 445, 467, 472,473, 477, 492, 495: n = A,T,C or G
aaaaaaacagaaacaaatcaacagctctctacatcatgcatgggtagntttcttaccccatctttttttttcctcaataattaacgcanagaaaccattgtttgaaaagaatntgaaaacttgctacagaaacacccggngaaanagggtgtggggcatattcatgccctagaatgcgcctaccacagtgtagctnttcataaatgcaacattgtagacatanatgaatccaaagtattcagcagttttcctccgntcagaagactaaagctccagnnngacaatgctcantgaggcttcacagccactggagggcaccattacccattcatcttgacatcncatttccatacaaaaggaccttgcccgggcggnccgctctaaaggggcgaagttccanncccacttggcggncngtttacntagtnggaattccgaccttcnngtacccaaagcttttggtcttnaattnnattngggccattagcttgnttntctctctgtc

SEQ ID NO: 210 - DNA, 400 bp, Homo sapiens
  misc_feature 299: n = A,T,C or G
aaaaccatgaaagaagttgaaggcagcattcctcagctctgtgacttgtgaccctatttgaagtttcaggatttgggtgtcacaaaggattgtccctaatccttggccctggggtcttccgagtgagctggtttaatactctgagaatgagcagggagatccagagaatgaatccctgaccgcatcacctaaactgtcttccaaacatgagacaaagctgactgttcacactgattgcccagcacataccgtcttgccagtttcttcttttctcccagtctcctgttcatccattctgntctcccttggggtgggaatctatgatggaggttactggggaaacagctcacagatttttggagaccaaaccaaaggtctcactaggaaatttatctgtttt

SEQ ID NO: 211 - DNA, 606 bp, Homo sapiens
  misc_feature 5, 13, 14, 20, 35, 36, 50, 229, 274, 427, 434, 501, 522,564, 565, 583, 594: n = A,T,C or G
caaancaaaattnngcccancgtctttctttctgnnttatgacagaccancctccagccttggtgtggtatctacatgtagccctgcgtaccctgcttctttttagcattcaagacccactcagggcctcaaattagccaatggtgaatatggatataggacttttagagggatgcaggttgagttgtacataacttagaggtgaagtgcaggtccgaaacagggctanactttggagaactgtaaaatggctcactgagcatgacagcatcangacccctggagtggctttcaaacttaccttcttctgcaggctacttctggaaatccctaggacttaccagctttctgaacactgcgcatcatgggagggtgaagaggaaaaggggctagttaaaatcttgcttctactgtgggccgaactcangaggagncctaaagctaagcccttgggcttgacagctctacttttcacctctaactaccactgtgcccaatgantgcccgagtgccaagatcaanacctcggccgcgaccccgctaagggcgaattccgcacacttnnggccgttactaatggatncgaacttcggncccaacttggcg

SEQ ID NO: 212 - DNA, 584 bp, Homo sapiens
  misc_feature 339, 418, 430, 437, 444, 446, 453, 480, 508, 514, 529, 530,540, 573, 581: n = A,T,C or G
aaacaaggtttccccatgaagcagggtgtcttgacccatggccgtgtccgcctgctactgagtaaggggcattcctgttacagaccaaggagaactggagaaagaaagagaaaatcagttcgtggttgcattgtggatgcaaatctgagccgttctcaacttggttattgtaaaaaaaggagagaaggatattcctggactgactgatactacagtgcctcgccgcctgggccccaaaagagctagcagaatccgcaaacttttcaatctctctaaagaagatgatgtccgccagtatgttgtaagaaagcccttaaataaagaaggtaagaaacctangaccaaagcacccaagattcagcgtcttgatactccacgtgttctgcagcacaaacggcggcgtattgctctgaagaancagcgtaccaanaaaaatnaaagaanangctgcanaatatgctaaacttttgggacctcggncgcgaccaccctaagggcgaattccacncacttngcgggccgtttctanngggatccganctcggtacccaaactttggcggtaatcattggncataaccntgg

SEQ ID NO: 213 - DNA, 419 bp, Homo sapiens
  misc_feature 44, 134, 166, 244, 293, 334, 335, 344, 357, 359, 376, 393,402, 405: n = A,T,C or G
ctggatgaagttgtgtcagagaaccagaggcttaaagtccctantccaaagcgaagagttgtctgtgtgatgatagtattggcatttataatactgaactatggacctatgagcatgttggaacaggattccangagaatgaaccctattgtgagccctgcaaatnaaaggaggcaccttctaggattttctgctaaagaggcacaggacacatcagatggtttatccagaaaaacagctacanatatgatcattctgtttcaaatgacaaaccctgatggtgctaactgaanaaccattgctttacattcctccacctccttgtcagcccctnnttaacacancagagtctctcangntaaaatcatgaacttcnagggatgggttcatatnaccttaaantancaaaggacccatgt

SEQ ID NO: 214 - DNA, 318 bp, Homo sapiens
aaatatcacaagtaggtcttaagtgtcatctggcatcttctttctgtagccaggtaactcttagatcttattcatcagcctgctgaacagttcctttttcagagacatagataccatccaaaaatttcctgatatccttgtttttaactgttgtggcttgctgaatcaaagccgctgaatttgaaacaagctcaatgtcatttccttcaaggattaattcatctttctgggcttgagatactgaacaagcaacacctggtctcatccgaaccctgcggatatatttttcacccaagaaatttcggatttcaacaagag

SEQ ID NO: 215 - DNA, 450 bp, Homo sapiens
  misc_feature 350, 399: n = A,T,C or G
cccgacttctgctggcatcaagaggtgggagggccctccgaccacttccaggggaacctgccatgccaggaacctgtcctaaggaaccttccttcctgcttgagttcccagatggctggaaggggtccagcctcgttggaagaggaacagcactggggagtctttgtggattctgaggccctgcccaatgagactctagggtccagtggatgccacagcccagcttggccctttccttccagatcctgggtactgaaagccttagggaagctggcctgagaggggaagcggccctaagggagtgtctaagaacaaaagcgacccattcagagactgtccctgaaacctantactgccccccatgaggaaggaacagcaatggtgtcagtatccaggctntgtacagagtgcttttctgtttagtttttactttttttgttttgttttttt

SEQ ID NO: 216 - DNA, 747 bp, Homo sapiens
  misc_feature 422, 432, 550, 560, 569, 577, 580, 584, 605, 614, 615, 625,640, 647, 669, 673, 687, 693, 701, 704, 711, 726, 727, 736,738, 746: n = A,T,C or G
gcgccggagctgggttgctcctgctcccgtctccaagtcctggtacctccttcaagctgggagagggctctagtccctggttctgaacactctggggttctcgggtgcaggccgccatgagcaaacggaaggcgccgcaggagactctcaacgggggaatcaccgacatgctcacagaactcgcaaactttgagaagaacgtgagccaagctatccacaagtacaatgcttacagaaaagcagcatctgttatagcaaaatacccacacaaaataaagagtggagctgaagctaagaaattgcctggagtaggaacaaaaattgctgaaaagattgatgagtttttagcaactggaaaattacgtaaactggaaaagattcggcaggatgataccaagttcatccatcaatttcctgactcnagttagtggnattggtccatctgctgcaaggaagttttgtagatgaaggaattaaaaccttagaagatctcagaaaaaatgaagataaatttgaaccatcatcagcgaattgggcttgaaatattttnggggactttngaaaaaaanaattcccnctnaaanaagatgtttccaaatgccaanaatattttnncttaaattgnaagttaaaaaaaaangggaatnctggaataccatttggttccantctntggggcaattttcnaaaaanaaggtccnaantccaatnggcgacaattggganntttttcctnanccatcccnc

SEQ ID NO: 217 - DNA, 693 bp, Homo sapiens
  misc_feature 442, 507, 536, 540, 569, 613, 628, 637, 643, 661, 676, 689: n = A,T,C or G
aaatatcacaagtaggtcttaagtgtcatctggcatcttctttctgtagccaggtaactcttagatcttattcatcagcctgctgaacagttcctttttcagagacatagataccatccaaaaatttcctgatatccttgtttttaactgttgtggcttgctgaatcaaagccgctgaatttgaaacaagctcaatgtcatttccttcaaggattaattcatctttctgggcttgagatactgaacaagcaacacctggtctcatccgaaccctgcggatatatttttcacccaagaaatttcggatttcaacaagagacccattctcctggataacaacgttgatggggaagtgagcatacacagacctcatcttgtaacggaagcccagtgtaacacccttgatcatgttctgtacatgactacaaatagtccgaacggnagccagttcctttctgttaccccccatttgtcaacccggaacctcttttttttcttttccagaangctgagttctcattgatgtgattgaaagncctncccaggggtcctctggggcccttacgaanactggcgtcccttcagaataatgtcgacattttctggaatgtcnacagctgatgctganaatagcttnacctgncccggcggccctcaaggngaattccacacactngcgcggttcctangatc

SEQ ID NO: 218 - DNA, 327 bp, Homo sapiens
cctgttctgggagatggtcatattcacctgccaaaatctgctggaatcctttgatggtctccttcaggggtaccagcttccccatatgacctgtgaagacctcagcaacctggaatggctgagacaagaaacgctgtattttccgtgcacgggacacggtcaacttgtcttcctcagaaagttcatccatacccaggatggcaatgatatcctggagggatttgtagtcctgcaggatcttttgcaccccacgggcaacatcgtaatgctcactgccaacaatgttgggatccatgatacgagaggtggagtctagaggatccacag

SEQ ID NO: 219 - DNA, 778 bp, Homo sapiens
  misc_feature 387, 529, 550, 563, 566, 597, 637, 638, 646, 652, 656, 665,673, 675, 687, 691, 697, 729, 741, 745, 747, 764, 767: n = A,T,C or G
aaagtgagcagattcatatttacagtgtgatttttaaggactgtctatatccaaattttattttcgtgaacgcttacattctaagagcagtacaattagcctattacgtagggccctaatcttgttagtatagtgttgttgaaatactttcttcagcttttgccttaacaaatccaaagatggaagatgatgacaatctggaatattcaacataacatgaaaaaattcattccacatatccaaatgaggaagccttctaaaaagaccttcaggcttacactctcctccttcatttttcactttcatgtaagtgccaaagagcatgcaatatactgttgcagcaaccccaaagtaatcgatctggtagttccatggtttgttgctgancatctcaacacactgaaaaccagatgtttcacactttgctgtgaatatagttccttttggaaaaagtttcatatctatactcttgacccaggtcaatcagtgccaagcccagcagaataaatcatctttcatcatcctgttnccaaaaaatccgttttccaantattgaaaattgnctngggtttaaaggtctcccttgaatggaatttncacaagtcattgccccttggcttcaaatccattgtaaaanncaatttcntcattngccnaaaaggaanatggaacnangaaccctttganggcnttcacntttttttcaaggggggtaattttttttattanaagggttaaatngggnanttttaaaataaaatggnttncccattaaacc

SEQ ID NO: 220 - DNA, 312 bp, Homo sapiens
gaggaaaggaagatgcactggtcaccaagaacctggtccctggggaatcagtttatggagagaagagagtctcgatttcggaaggagatgacaaaattgagtaccgagcctggaaccccttccgctccaagctagcagcagcaatcctgggtggtgtggaccagatccacatcaaaccgggggctaaggttctctacctcggggctgcctcgggcaccacggtctcccatgtctctgacatcgttggtccggatggtctagtctatgcagtcgagttctcccaccgctctggccgtgacctcattaacttgg

SEQ ID NO: 221 - DNA, 332 bp, Homo sapiens; identical to SEQ ID NO: 23

SEQ ID NO: 222 - DNA, 439 bp, Homo sapiens
  misc_feature 384: n = A,T,C or G
ctgattcagatcagagggaaagaaataccaaccctgcaataagtgtactaaactctacgctctggttaatgtaatgtactctcctggactgaatgcagtgtataatttctgtctacagctagaagctgtgccccagttccacatttgattacacatgtgagatttgctgctgttgcagtataaacactaggtataataggatttgaaattgcattacagttcataaaaattgaaaatgagaaattaaacctgcaagtgaaacatttgaaacgattatactttctacataagacatggttgggacatcagatacttacaaagatggtttaagtatggatactagagaaaattaagttttctttctctttggtttattgatttggnttaatttccattatgctattttgcataatcaaggcactgtaaatcttataatttt

SEQ ID NO: 223 - DNA, 721 bp, Homo sapiens
  misc_feature 410, 546, 549, 566, 571, 576, 594, 607, 658, 664, 682, 710: n = A,T,C or G
aaaaaatcatacggacaaacaactttcaaacaaaactggattagtaggatttcttgcctgcttaactaacatgacagacttcttgtcccaagcccttctcagaaaaacctcatgtggaaaccaagctagagataagaattcttccctgatgcagttaggggaaagggaaaggctagaaacttctttggcaagcaattccacacacagccatttatgtgtgagtgctctgcttcaagcacagtacactctttgcagggacggccagatgttcagagtgggagtggtacttttcaaccagctaaaagtgcagaagtcatctagtcgtctgcctcttcccactgccagtgcctgcagccttgcagcaacttttaaccacccctatggactggaatattgagttaaaagccaangctgagctggctgacgctgtagtctccattgaaaaggaaatggatgggatggaaccgagaaaccccagtacatgatgacactcaaaagacttagggggaaagagaaggaaggatttcagaaatgggggacagactnggnggaaaatggttgggctnaactnggaangaaatgggggatacctgnagttaatattgtncatttcgaaaccaatcaagttgcctcctggaatggcaaaaaatcaaatggnggaaangggaaccttccttgatantttaggggccaacagggattgggaaaanacttccttgaa

SEQ ID NO: 224 - DNA, 665 bp, Homo sapiens
  misc_feature 510, 522, 526, 551, 554, 559, 572, 585, 604, 612, 619, 623,636, 645: n = A,T,C or G
ggaacctgccatgaacccaacaaatgccaatgtcaagaaggttggcatggaagacactgcaataaaaggtacgaagccagcctcatacatgccctgaggccagcaggcgcccagctcaggcagcacacgccttcacttaaaaaggccgaggagcggcgggatccacctgaatccaattacatctggtgaactccgacatctgaaacgttttaagttacaccaagttcatagcctttgttaacctttcatgtgttgaatgttcaaataatgttcattacacttaagaatactggcctgaattttattagcttcattataaatcactgagctgatatttactcttccttttaagttttctaagtacgtctgtagcatgatggtatagattttcttgtttcagtgctttgggacagattttatattatgtcaattgatcaggttaaaattttcagtgtgtagttggcagatattttcaaaattacaatgcatttatggtgtcttggggggcanggggaacatcanaaanggtaaattgggcaaaaatgcgtaantcnccaanaaatttggatggngccagttaatggntgaagttacagcatttcanaaatttanttgtcanaaantttaaaaaggttnggttaccantttttacccttgccccgggc

SEQ ID NO: 225 - DNA, 720 bp, Homo sapiens
  misc_feature 488, 495, 547, 554, 584, 652, 655, 680, 682, 692, 697, 698,704, 707, 715: n = A,T,C or G
gtcctttctctgaaaggatttatgtttttcttcgttagatagtgacttctgagcaagctgatctcccctggcatgctccaacctgattggacaaaggaagctctatggcctgggagagagactattcttaatttttctttcttacaaaaactgatttttcccataaatatttttacttcagaggactaggaccattttgttttgggcccttctgctgaaaatttgtctcgtttaagaggcagctagaatctttaccatatgtatgaatttgtataatttcatttttggatagggataaacttttgcttctgataaaagcctggaatttcatctggtcctcagagcattgcgtgtgtgtcttgctgtagcccggaaaaggttttgtgtaaagattctgggatggcaagttgtttgccttttctgaaaagagaacatacagaacctgtcatctttaagaccttcatcccatggaatctactatacaggangatgcantggggctggagggggatgggcgaaaatggggaacaggaagcctggcctgggnttctggncatgggcctcctaaaaccttaaacttcaangtagaaaatgccctcaaccccctatttataaaccaaaacttttcctggcctccccccaaaccccctanaanaacattacccctgggaattgccccncnccctgggttnggaanncaattnggncaaacccngcccc

SEQ ID NO: 226 - DNA, 308 bp, Homo sapiens
ccttgaccttttcagcaagtgggaaggtgtaatccgtctccacagacaaggccaggactcgtttgtacccgttgatgatagaatggggtactgatgcaacagttgggtagccaatctgcagacagacactggcaacattgcggacaccctccaggaagcgagaatgcagagtttcctctgtgatatcaagcacttcagggttgtagatgctgccattgtcgaacacctgctggatgaccagcccaaaggagaagggggagatgttgagcatgttcagcagcgtggcttcgctggctcccactttgtct

SEQ ID NO: 227 - DNA, 277 bp, Homo sapiens
ccaattgaaacaaacagttctgagaccgttcttccaccactgattaagagtggggtggcaggtattagggataatattcatttagccttctgagctttctgggcagacttggtgaccttgccagctccagcagccttcttgtccactgctttgatgacacccaccgcaactgtctgtctcatatcacgaacagcaaagcgacccaaaggtggatagtctgagaagctctcaacacacatgggcttgccaggaaccatatcaacaatggcagcatcac

SEQ ID NO: 228 - DNA, 648 bp, Homo sapiens
  misc_feature 441, 540, 546, 571, 575, 605, 608, 612, 619, 621, 629: n = A,T,C or G
aaatgggtaaagccatttacataatatagaaagatatgcatatatctagaaggtatgtggcatttatttggataaaattctcaattcagagaaatcatctgatgtttctatagtcactttgccagctcaaaagaaaacaataccctatgtagttgtggaagtttatgctaatattgtgtaactgatattaaacctaaatgttctgcctaccctgttggtataaagatattttgagcagactgtaaacaagaaaaaaaaaatcatgcattcttagcaaaattgcctagtatgttaatttgctcaaaatacaatgtttgattttatgcactttgtcgctattaacatcctttttttcatgtagatttcaataattgagtaattttagaagcattattttaggaatatatagttgtcacagtaaatatcttggtttttctatgnacattggacaaatttttcattccttttgctcttttgggggtgggatctaacactaactgtattggtttggttacatcaaataaacatttttccctcggncgcgancacccttaagggcgaatttccagcncccntggcggccgttactagggggaatccccaanctncggnccccaancnttgggcgnaatcatgggccatagctgg

SEQ ID NO: 229 - DNA, 693 bp, Homo sapiens
  misc_feature 227, 341, 436, 453, 491, 509, 525, 533, 538, 546, 562, 567,572, 584, 585, 592, 612, 621, 637, 642, 661, 665, 685: n = A,T,C or G
aaaaatgtaacaaacatctaaatatctgacaataaaatctgaaatgctgtaacttcaacattaactgcaccatccaaattcttgtgacttacgcatttttgcccaatttaacctttctgatgttcccctgcccccagacaccataaatgcattgtaattttgaaaatatctgccaactacacactgaaaattttaacctgatcaattgacataatataaaatctgtnccaaagcactgaaacaagaaaatctataccatcatgctacagacgtacttagaaaacttaaaaggaagagtaaatatcagctcagtgatttataatgaagctaataaaattcangccagtattcttaagtgtaatgaacattatttgaacattcaacacatgaaagggtaaccaaaggctatgaacttggtgtaacttaaaacgttcanatgcgggagtcacccanatgtaattgggatccagggggatcccccccgctcctcnggctttttaaattgaagncgtgtgctgcctggancttgggcncctgntgggctcngggcatgtatgaaggnttggnttctncccttttattgnngggggcntccatgccaacccttttttnacatttggnattttggttggggtcnattgngggggttccttgtgccccnccgnccaggctccgcgggccggcntggaatcc

SEQ ID NO: 230 - DNA, 377 bp, Homo sapiens
ctgtttacagaaatatagttgcgagtatacaaatgttccaatagaagcaaaatatctttttaatatttaacaagttatcacagatagctaaaaacatagatgcaaatgaaattcccccagagaacaaactgaaaatatctggtatcagtgctctgaaatcccaactatgaaagccatatacacaaaaatgtaacccttatatcattgcaggacaatggaagaaggcagttcagtggttgatcagtgtgctcaagcaaataaaattaaataaaaattaaaaatggcagaatggtagctaaaccacttgagaacaggttaatgaaattattggtactatacttaaaacattaagtaaaagaagtgaatgaaactcattt

SEQ ID NO: 231 - DNA, 349 bp, Homo sapiens
ctgaactagacccaggtgaggcagggctgaaaactgcccttgggctgacttttgataggccatgccttgccactttacaagttctttttgcatttactagtatttaagagtaaccttgagattgggaggaatagaggaggctggtacaaatagatggagacctgctgggatcagtgaatgcctgattaggacatggggctatgcatagcctaagagttataggcttaaagatgtcgagtaactaaaaactgtattgctggccgggcgcggtggctcacgcctgtaatcccagcactttgggaggccaaggcgggcagaccatgaggtcaggagattgagaccatcctgg

SEQ ID NO: 232 - DNA, 273 bp, Homo sapiens
ctggctcaggaagccaagaaactggatgccaagaccccatcccagcggaacaagtggcaacagcaggagttaatagcagagttgaggcggcgccaggccaaggaacaccggcctgtttatgaggggaaggatggtaccatcgaggacatcatcacagtgctgaagagtgtccctttcacggcccgtactgccaagcggggctcacgcttcttctgtgatgcagcccaccatgatgagtcaaactgttagcccccaaggttggggcccgacagg

SEQ ID NO: 233 - DNA, 438 bp, Homo sapiens
ctgttgaattgacagaaaaaattgctcagcttttcagcatttccccttgccagatcagccagatttacaagcaggggccaacaggaattcatgtgctcatcagtgatgagatgatacagaactttcaggaagaagcatgttttattctggacacaatgaaagcagaaaccaatgatagctatcatatcatactgaagtaggagtgcggcgtttcgtgcccagtggctgctccttccttcacctctgaaaacggccctcttgaagggggatatgaatggagatttgaaggtctgcaagaacctgactcgtctgactgtgtgtggaggagtccaggccatggaggcagaatcctggccctctgtgttggcccaagctcttgtggtacacacagattactgcccaatatgcagttctgcagacctcggcccgcgaccacgc

SEQ ID NO: 234 - DNA, 312 bp, Homo sapiens
  misc_feature 192, 199, 214, 218, 219, 243, 249, 257, 258, 270: n = A,T,C or G
cgagacagttactcaagcagccgaagtgatctctactcaagtggtcgtgatcgggttggcagacaagaaagagggcttcccccttctatggaaagggggtaccctcctccacgtgattcctacagcagttcaagccgcggagcaccaagaggtggtggccgtggaggaagccgatctgatagagggggaggnagaagcngatactaaaaacaancaannctttggaccaaaatcccaggttcncagaancaaaaaanngactggagaacnattctatcataactccccaaggactactcaaaggaaaaaatt

SEQ ID NO: 235 - DNA, 569 bp, Homo sapiens
  misc_feature 404, 407, 416, 451, 472, 481, 489, 492, 494, 502, 509, 535,538, 540, 551, 560, 564: n = A,T,C or G
ccttggtcctagcacccactcgagaattggctcagcagatacagaaggtggtcatggcactaggagactacatgggcgcctcctgtcacgcctgtatcgggggcaccaacgtgcgtgctgaggtgcagaaactgcagatggaagctccccacatcatcgtgggtacccctggccgtgtgtttgatatgcttaaccggagatacctgtcccccaaatacatcaagatgtttgtactggatgaagctgacgaaatgttaagccgtggattcaaggaccagatctatgacatattccaaaagctcaacagcaacacccaggtagttttgcttgtcagccacaatgccttcttgatgtgcttgaggtgaccaagaagttcatgagggaccccattcgggattcttgtnaanaaggaaganttgacccttggagggtatccgcccagttctacatnaacctggaaccaagaagagtnggaagctgnacacactnatngngacttggnatgaaanccctggaccattgaccccaggaaggnaantnttgcattcaanaaccccggnaagnaaggt

SEQ ID NO: 236 - DNA, 287 bp, Homo sapiens
  misc_feature 268, 272, 276: n = A,T,C or G
ctgaatggtgctgacggtggagctcacagagctcctgcattctcaaggtttggatacattctgggaagggtgaactggtgtaagagtcacataatacgtggaggggtgtaataatcaaaaaaacatagcaaaacaccttctgtgcctgagccagggttgagggagccgagaagaaagtccacagctctgccacacgggccagcagtgctcatgtctgctggctgatcctccccaaagcctctcctgccaccttttttttttttttttnaacnaaanaaaagggaaaa

SEQ ID NO: 237 - DNA, 631 bp, Homo sapiens
  misc_feature 484, 493, 530, 542, 552, 557, 566, 575, 583, 593, 594, 602,614, 616: n = A,T,C or G
aaagagatttattaaatcatcttatcacaaagatggaaacatatacaaactagaaacatgcaaccatcatcttccacagtcaagtcacaatgtcaaatatttttcttgcctctgcagatgaaaagttcagatcttatacccaactacttactcaccccgaatatttaagtcagtcttcctgaaagtactcagggtagcaagtaacaaaatgcaaacgattatataaagaaagtgcagttaaaagggaaactatgtggcaagtaccctctttcccttcccaccccccaattaaaggcaaacaatggcactttgcccttgcttaacctagattgtcttcaaaaactattaaaatgtaaaagacttaacaaaaaaacaaaaagacgtttaacagatgtcaaaaagctccttagtgtttgaaaataaatgcttaaacaaaagacaacatattttatatcaaacaagtttgaagagccctgaattgcancattctgtncataaacaaacaaaaagcttggtgttaggatttattngtcaaaaggcangaatttcttnaggcnggctaaggnaagggaggngggggggntcgttttttnnggcatttnttcacgggcccngnccgataggggtgggc

SEQ ID NO: 238 - DNA, 426 bp, Homo sapiens
ctcacgttgatgtcaagactaccgatggttacttgcttcgtctgttctgtgttggttttactaaaaaacgcaacaatcagatacggaagacctcttatgctcagcaccaacaggtccgccaaatccggaagaagatgatggaaatcatgacccgagaggtgcagacaaatgacttgaaagaagtggtcaataaattgattccagacagcattggaaaagacatagaaaaggcttgccaatctatttatcctctccatgatgtcttcgttagaaaagtaaaaatgctgaagaagcccaagtttgaattgggaaagctcatggagcttcatggtgaaggcagtagttctggaaaagccactggggacgagacaggtgctaaagttgaacgagctgatggatatgaaccaccagtccaagaatctgttt

SEQ ID NO: 239 - DNA, 451 bp, Homo sapiens
  misc_feature 439: n = A,T,C or G
ctgttgggccaactacacagaccttactccccttagaacaggaaaaaattataagattgaatttatactggataatgttgttggggtagaatccagaactttcagcctgctggcagagtctgtctctagcagtggcagcagcagcagcagcaacagcaaagcatcaactgtgggtacatatgcccagataatgactgtagtaattagctgtctggttggaagaatgtggctcttggaaatatttatggctgcagtttcaactttgaatataactttaagaagctactaaagtgctgttccgaagaataggctgaaacaaaaatataagaattattagctactttgttgggcaataggcaaaagtctatagcattttcatgaaaatatactaaaaatatttttatgatatataaaatgtactaattagctttacctcggnccgcgaccacgc

SEQ ID NO: 240 - DNA, 341 bp, Homo sapiens
  misc_feature 326, 335: n = A,T,C or G
cttcaagctaggttttgcagttcccaaccacaacattcttctattttgccaggctggtgcaaagtaattaaagatgtcaatcagaaatgtcaatgagactaaagtggttttgtaaatctcagctatatttagcaacactccatgtagctaatattttttggtagcatctggtagaccttagaatgttacatagccagtaggttctttattcaaattttaagtatcttaagaatagtagggcagtaacagttacttttgagagttttctggtcaagcttttaccaggcattctctagccttggtacaaaaaaaaaaacctgctggtngcgcaaatncctagg

SEQ ID NO: 241 - DNA, 430 bp, Homo sapiens
  misc_feature 238, 328, 365, 374, 378, 382, 386, 388, 395, 400, 427: n = A,T,C or G
ctcaaatgtataaaccattaagtagtcaaatggctacagtgaaaaacagtattttatagtaggtatagataattggcacagataagctcagaaaagaatgatcagttcttgctggagtaattctagggaaatggctttcatggagaaaaggaaaagaggaagtgtagtatcagtctatgttgtctattgctaatgtggaatggtgttttctgcttctacgccttactgattccagttnttatatttagaaaacaaattaagtgaagcttctggaggtagggctgaaaatggtgaaagaagtgacttggaagaggacaacgagaggganggaacggaaaatggagccattgatgctgtgtcctgtnatgaaaatntttncacnggananggatttnggatngctacgaagaacggaattcggattccnctt

SEQ ID NO: 242 - DNA, 239 bp, Homo sapiens
  misc_feature 92, 93, 147, 150, 162, 165, 187, 191, 196, 205, 207, 210,227, 232: n = A,T,C or G
gtcgcagtagttccagtagcagctccagtacaagtggcagcagcagcagagatagtagcagtagcactagtagtagtagtgagagtagaagnnggagtaggggccggggacataatagagatagaaagcacagaaggagcgtggatnggnagagaagggatnctncaggaatggaaagatgttcatnatanaaatngtggtgtananaanatcaaaaaaactggggntttgnattaacg

SEQ ID NO: 243 - DNA, 282 bp, Homo sapiens
  misc_feature 241, 267, 274: n = A,T,C or G
aaatgactgtgctgcccctttcacatcaaagaactactgacaacgaaggccgcgcctgcctttcccatctgtctatctatctggctggcagggaaggaaagaacttgcatgttggtgaaggaagaagtggggtggaagaagtggggtgggacgacagtgaaatctagagtaaaaccaagctggcccaaggtgtcctgcaggctgtaatgcagtttaatcagagtgccattttttttttgtncaaatgattttaattattggaatgcncaattgntttaatat

SEQ ID NO: 244 - DNA, 712 bp, Homo sapiens
  misc_feature 593, 606, 608, 677, 682, 697, 701, 703, 710: n = A,T,C or G
aaaggtccaaaagcctgccaacccctgggaattctacattgggacccagttgatggaaagactaaagccatctatgcagcacatgtttatgaagttctattctgcccacttattccagaatggcagtgtattagtaggagagctctacagctatggaacattattaaatgccattaacctctataaaaatacccctgaaaaagtgatgcctcaaggtcttgtcatctcttttgctatgagaatgctttacatgattgagcaagtgcatgactgtgaaatcattcatggagacattaaaccagacaatttcatacttggaaacggatttttggaacaggatgatgaagatgatttatctgctggcttggcactgattgacctgggtcagagtatagatatgaaactttttccaaaaggaactatattcacagcaaagtgtgaaacatctggttttcagtgtgttgagatgctcagcaacaaaccatggaactaccagatcgattactttggggttgctgcaacagtatattgcatgctctttggcacttacatgaaagtgaaaaatgaaggaaggagaagtgtaaaccttgaangtctttttagaangntttcctcatttgggatattgtgggaatgaatttttttcatgttattgttgaatattccaaaatggcatnttctncctctttggaattgntaangnaaaaacncg

SEQ ID NO: 245 - DNA, 689 bp, Homo sapiens
  misc_feature 481, 489, 505, 533, 535, 538, 585, 589, 591, 595, 626, 647,655, 661, 662, 683: n = A,T,C or G
catttttaaggcttatctaattaactgtgtttggaactgctataaatacatcaacaaccgaaacgtgccggagattgctgtgtaccctgcctttgaagcacctcctcagtacgttttgccaacctatgaaatggccgtgaaaatgcctgaaaaagaaccaccacctccttacttacctgcctgaagaaattctgcctttgacaataaatcctataccagctttttgtttgtttatgttacagaatgctgcaattcagggctcttcaaacttgtttgatataaaatatgttgtcttttgtttaagcatttattttcaaacactaaggagctttttgacatctgttaaacgtctttttgtttttttgttaagtcttttacattttaatagtttttgaagacaatctaggttaagcaagagcaaagtgccattgtttgcctttaattggggggtgggaagggaaagagggtacttgcccatagntgcctttntaactgcactttctgnatataatcgtttgcattttggtacttgntnccntgagtactttcaggaagactgacttaaatatttcggggtggagtaangagntngggnattaagaacttgaaactttttcatttgccanaaggcaaaaaaaaaaaatttngaccattngggggnnttggacctgtgggaaaaaaanaatggg

SEQ ID NO: 246 - DNA, 701 bp, Homo sapiens
  misc_feature 496, 526, 539, 573, 584, 647, 688, 701: n = A,T,C or G
ctgaaagaagcccaagtacagtatcctctccagacatttgcaattggcatggaagacagccccgatttactggctgctagaaaggtggcagatcatattggaagtgaacattatgaagtcctttttaactctgaggaaggcattcaggctctggatgaagtcatattttccttggaaacttatgacattacaacagttcgtgcttcagtaggtatgtatttaatttccaagtatattcggaagaacacagatagcgtggtgatcttctctggagaaggatcagatgaacttacgcagggttacatatattttcacaaggctccttctcctgaaaaagccgaggaggagagtgagaggcttctgagggaactctatttgtttgatgttctccgcgcagatcgaactactgctgcccatggtcttgaactgagagtcccatttctagatcatcgattttcttcctattacttgtctctgccaccagaaatgagaattncaaagaatgggatggaaaacatcttctganagagacgtttgangattccaatctgatcccaaagagattctctgggnaccaaaagaanccttcagtgatggaataacttcagttaagaattcctgggttaagattttacaggaatacgttnaacatcaggttgatgatgcaatgatggcaaatgcagcccanaaatttcccttcn

SEQ ID NO: 247 - DNA, 577 bp, Homo sapiens
  misc_feature 90, 498, 503, 509, 513, 522, 525, 542, 544, 557, 560, 568: n = A,T,C or G
aaatatcacaagtaggtcttaagtgtcatctggcatcttctttctgtagccaggtaactcttagatcttattcatcagcctgctgaacanttcctttttcagagacatagataccatccaaaaatttcctgatatccttgtttttaactgttgtggcttgctgaatcaaagccgctgaatttgaaacaagctcaatgtcatttccttcaaggattaattcatctttctgggcttgagatactgaacaagcaacacctggtctcatccgaaccctgcggatatatttttcacccaagaaatttcggatttcaacaagagacccattctcctggataacaacgttgatggggaagtgagcatacacagacctcatcttgtaacggaagcccagtgtaacacccttgatcatgttctgtacatgactacaaatagtccgaacggagccagttcctttctgttccccaccatttgtcacccggacctcttttttttctttcnagaangctgantctncattgatgngantgaagccctcccagggntnctctggggccttnacnataactgngcgtccctt

SEQ ID NO: 248 - DNA, 167 bp, Homo sapiens
aaagtaagtcgtttccttttatttgaacacctaggggccattttagagttataattagcccaatttctatatcattttgtctcagggaatagaagcgtgagggagggagagagttgggggaatggctggttggtagagtggtcagaatacacacaacatttataaat

SEQ ID NO: 249 - DNA, 333 bp, Homo sapiens
  misc_feature 280, 293, 326: n = A,T,C or G
gtctactgcgagaatgaagactattctcagcaatcagactgtcgacattccagaaaatgtcgacattactctgaagggacgcacagttatcgtgaagggccccagaggaaccctgcggagggacttcaatcacatcaatgtagaactcagccttcttggaaagaaaaaaaagaggctccgggttgacaaatggtggggtaacagaaaggaactggctaccgttcggactatttgtagtcatgtacagaacatgatcaagggtgttacactgggcttccgntacaagatgaggnctgtgtatgctcacttccccatcaacgttggtntccagga

SEQ ID NO: 250 - DNA, 364 bp, Homo sapiens
  misc_feature 314, 317, 320, 333, 348, 353: n = A,T,C or G
ccacaaaaaagcatgcaaagtcattgttacaacagggatctacagaactatttcaccaccagatatgacctagttttatatttctgggaggaaatgaattcatatctagaagtctggagtgagcaaacaagagcaagaaacaaaaagaagccaaaagcagaaggctccaatatgaacaagataaatctatcttcaaagacatattagaagttgggaaaataattcatgtgaactagacaaagtgtgttaagagtgataagtaaaatgcacgtggagacaagtgcatccccagatctcagggacctcccccctgnctntcnaccttgggggaantgagaagacaaggantgggncttgttccttg

SEQ ID NO: 251 - DNA, 248 bp, Homo sapiens
  misc_feature 87, 93, 99, 160, 169, 176, 182, 188, 190, 196, 214, 219,226, 229, 231: n = A,T,C or G
gccagcgcgaaggaagtgctggagtcgtgtgttttggctgcgcgtgatcctgcgtgggtcgggaggtgtttctgtgaaaagcctaangattanactgtnagaaaagaaaatagaagccatgtttcgaagacctgtattacaggtacttcgtcagtttgtnagacatgantccgaancaactnccagtntngtcttngaaagatccctgaatcgngtgcncttcttntgncnagtgggtcaggaccctg

SEQ ID NO: 252 - DNA, 538 bp, Homo sapiens
  misc_feature 344, 354, 360, 363, 366, 373, 395, 400, 403, 410, 415, 417,425, 432, 440, 444, 448, 464, 469, 472, 495, 513, 518, 534: n = A,T,C or G
aaacttcagctcagtttcttaaccaagaaccacgtcaaccctccagggttgtggtttgtatttttgcctttaagcattatctcctttccaccaagaagcctacttaggtttaacacatgaaagcagtgtctaaaaattagatcggtcctaaattggaatgggatgtcttccttgcatgtcccataccagggaatttttttaacacacagtgtagagcctttgccagagatgttgaaagggagattaaaggcttgagggatgaatttgatcatcattcttaaagtcccttccaatcctgtgattctctgattccctgagctcggttattattggacatgcctagnccattaccangacctnccngcntatggtngtttccctgggataacggaganctatnccncatgccnttggngnctccatcntatcaangaagttgntttntganttttttccatctaaancctcntangtttggtttgagaaaaagatggngaagtccttttcatgaanttcgnagggcaaaaaaaattntttt

SEQ ID NO: 253 - DNA, 332 bp, Homo sapiens
  misc_feature 271, 279, 280, 299, 309, 313, 321: n = A,T,C or G
cctgacttctgctggcatcaagaggtgggagggccctccgaccacttccaggggaacctgccatgccaggaacctgtcctaaggaaccttccttcctgcttgagttcccagatggctggaaggggtccagcctcgttggaagaggaacagcactggggagtctttgtggattctgaggccctgcccaatgagactctagggtccagtggatgccacatgcccagcttggccctttccttccagatcctgggtactgaaagccttagggaanctggtctnngaggggaagcgggcctaanggattgtttnatancaaaaccnacccattcaga

SEQ ID NO: 254 - DNA, 343 bp, Homo sapiens
  misc_feature 299, 334, 335, 339: n = A,T,C or G
ctgcaggcagtcccggctgagtttgaatgcatccaccctgagaagcagcagaaaaagaaaagctacaagaactctggaactatccgtgtcaagatttgtcgggtagaaacagagtactcctttctggactatgtgatgggaggctgtcagatcaacttcactgtgggcgtggacttcactggctccaatggagacccctcctcacctgactccctacactacctgagtccaacaggggtcaatgagtacctgatggcactgtggagtgtgggcagcgtggttcaggactatgacttcanacaagctgttccctgcattttggatttgggggccnnggtncccc

SEQ ID NO: 255 - DNA, 404 bp, Homo sapiens
  misc_feature 190, 338, 359, 374, 383, 390, 398: n = A,T,C or G
aaaactgcaagcaccatgcggttcatacaatcttgttattactgttaatttatcaactaatacaaactcaaaaatgcatccggccagcagcgccagcaatttcaaatgggaacttaaaaatacacttttattttggtatttttgtcagtgcaacttaaatccttttactgacctgcagaaaaaaaaagtnataataaagaaaaacacccatatcttccctataactactatacaactgaagaattgaaggggggggacaccaccaagaactcttcctactatctcaaaagcagggaaagaaacgcaatgcattggtttaaagaacccccttggaaaanttgcaaaatacttggccatgngtggggttttgggtncattcttgnacctagnaagttagngttaag

SEQ ID NO: 256 - DNA, 339 bp, Homo sapiens
  misc_feature 310, 311, 331, 335: n = A,T,C or G
ccagtggtcggagcggcagggttccacaaacttctccacgaggtccacaaacaggtctctgacatctttattgtgggtcagcttggcggccacgttcaccagcccccgggacaggttcttgaagttggcttccatctcagagaagacgcccagctttccccggagagcagtgcacaccaggctcttgtgcaggtccagaaggtccttgtcagccactagcaccttgagctccttcaagtcctggagaaattccttgtctaagtccatgtccatgtcatccatctgtgagtcgacggctccaaaggtccanntttggatcatgagctcaacngcanaaag

SEQ ID NO: 257 - DNA, 553 bp, Homo sapiens
  misc_feature 345, 352, 355, 359, 364, 399, 415, 430, 435, 457, 478, 487,497, 507, 523, 533, 548: n = A,T,C or G
aagagagaagattattttggaatcacaaatcttgttgaacatccagcccagctcaatcctccagttgacaatgacacaccagttactctgggagtatatcttaccaagaaggaacagaaaaaacttcggagacaaacaaggagggaagcacagaaggaactacaagaaaaagtcaggctgggcctgatgcctcctccagaacccaaagtgagaatttctaatttgatgcgagtattaggaacagaagctgttcaagaccccacgaaggtagaagcccacgtcagagctcagatggcaaaaagacagaaagcgcatgaagaagccaaccgcctgcccgaaaactcncagccgnacnagangaaanggccaagaaaatttaaaaaggtttaaagaaaaacntttccccaggggggtncccatttcttgtttnttaanagttccgaaattttgaagcaancccagcccaaaaagttcaaanaattggaancccattgctngggcaacttntccctgacaagggggnggggggtacntgccccagggatgtncaccg

SEQ ID NO: 258 - DNA, 445 bp, Homo sapiens
  misc_feature 355, 358, 360, 366, 373, 376, 387, 389, 400, 404, 407: n = A,T,C or G
aaaaaatgcactgagtttgggttaaaaaccaaccaccaaaatggatttcaacacagctctaaagccaagggcgtggccggctctcccaacacagcgactcctggaggccaggtgcccatgggcctacatcccctctcagcactgaacagtgagttgatttttctttttacaataaaaaaagctgagtaatattgcataggagtaccagaaactgcctcattggaaacaaaaactatttacattaaataaaaagcctggccgcaggctgcgtctgccacatttacagcacggtgcgatgcacaccgtgaccaaaccacggaagcagcttctggcacttacacccacgaactgcccnggncnggccgntcaaaangcnaaatttccacncnctggccgggcngttnttngtgggatccaacctcggtcccaagcttgggcgtaatta

SEQ ID NO: 259 - DNA, 348 bp, Homo sapiens
  misc_feature 306, 310, 318, 330, 333, 343: n = A,T,C or G
aaacccgccggactttctgtaagaagtgtggcaagcaccaaccccataaagtgacacagtacaagaagggcaaggattctctgtacgcccagggaaagcggcgttatgacaggaagcagagtggctatggtgggcaaactaagccgattttccggaaaaaggctaaaactacaaagaagattgtgctaaggcttgagtgcgttgagcccaactgcagatctaagagaatgctggctattaaaagatgcaagcattttgaactgggaggagataagaagagaaagggccaagtgatccagttctaantgtnatcttttnttattgaagacnatnaaatcttganttttt

SEQ ID NO: 260 - DNA, 379 bp, Homo sapiens
  misc_feature 335, 337, 346, 372, 375: n = A,T,C or G
ctgcaagccattcgaataattcaagagagaaatggtgtattacctgactgcttaaccgatggctctgatgtggtcagtgaccttgaacacgaagagatgaaaatcctgagggaagttcttagaaaatcaaaagaggaatatgaccaggaagaagaaaggaagaggaaaaaacagttatcagaggctaaaacagaagagcccacagtgcattccagtgaagctgcaataatgaataattcccaaggggatggtgaacattttgcacacccaccctcagaagttaaaatgcattttgctaatcagtcaatagaacctttgggaaagaaaatggaaangnctgaaactnctcccttccccaaaaaggacctcggncgngacc

SEQ ID NO: 261 - DNA, 334 bp, Homo sapiens
  misc_feature 265, 297, 305, 311: n = A,T,C or G
ccttgagagcccagcccttgcatcagtgtagcctggacgtgagacatggagtcaaaagagattattttggagctttaagattcaatggctgccctgctgggttttgaacttgcacgtggcctgtagcctctttgttttgcctgatttctctcttttggaatgggagtgtttagccaatgcctgtgcccctattgtatcttggaagtaactaacttgtttttttattttatagactcatgggcagaagggacttgccttgtctcanatgagactttggactgtgggacttttgagttnacactganatgagntaaaatttttggggacttgttga

SEQ ID NO: 262 - DNA, 376 bp, Homo sapiens
  misc_feature 104, 186, 194, 219, 224, 231, 239, 260, 267, 275, 296, 303,312, 323, 326, 330, 336, 344, 349, 353, 355, 363, 367: n = A,T,C or G
catttttaaggcttatctaattaactgtgtttggaactgctataaatacatcaacaaccgaaacgtgccggagattgctgtgtaccctgcctttgaagcacctnctcagtacgttttgccaacctatgaaatggccgtgaaaatgcctgaaaaagaaccaccacctccttacttacctgcctgaanaaatgctncctttgacaataaatcctataccanctttntgtttgngtatgctnacagaatgctgcaattcacgngctcttnaaacttgngtgatataaaatttggtagcntttcgcntaagcattncattttcgaancantaangagggnctttgccntttgnttancnagctttgntttnctcttttgg

SEQ ID NO: 263 - DNA, 333 bp, Homo sapiens
  misc_feature 290, 313, 323, 327: n = A,T,C or G
ctgctatttccaccaatagagagaccaggaagaatcctttactgcagtctccatcacgaaatgagaacaaaacgtccatgttctcataagtcaggggcttattaggatcctttttcttccagtttgccaagacacagtctgcataaaccaaaataggaggcagttccagtttcttggagagttggcagtaaggaacagcaatatttcttggcaagaccttacggacatctccattgacctttgccccacacatatgccatggtgatgcatcccagaactagacgtgcaangccgctgtgacttgtggtcttgngagatgatcnatgntggagc

SEQ ID NO: 264 - DNA, 347 bp, Homo sapiens
  misc_feature 226, 269, 277, 319, 320, 343: n = A,T,C or G
gaaagagtaaaaccttttatgacaggggctgcagaacaaatcaagcacatccttgctaatttcaaaaactaccagttctttattggtgaaaacatgaatccagatggcatggttgctctattggactaccgtgaggatggtgtgaccccatatatgattttctttaaggatggtttagaaatggaaaaatgttaacaaatgtggcaattattttggatctatcacntgtcatcataactggcttctgcttgtcatccacacaacaccangacttaanacaaatgggactgatgtcatcttgagctcttcatttattttnnctgtgatttatttggaatgggangccc

SEQ ID NO: 265 - DNA, 411 bp, Homo sapiens
  misc_feature 342, 346, 357, 365, 370, 380, 381, 386, 391, 399, 405: n = A,T,C or G
tcttgttgaaatccgaaatttcttgggtgaaaaatatatccgcagggttcggatgagaccaggtgttgcttgttcagtatctcaagcccagaaagatgaattaatccttgaaggaaatgacattgagcttgtttcaaattcagcggctttgattcagcaagccacaacagttaaaaacaaggatatcaggaaatttttggatggtatctatgtctctgaaaaaggaactgttcagcaggctgatgaataagatctaagagttacctggctacagaaagaagatgccagatgacacttaagacctacttgtgatatttacctcggcccgcgaccacccttaanggcnaaattccacancactggcnggccntttccttggnnggatnccaanctcgggtnccaagnctttgg

SEQ ID NO: 266 - DNA, 291 bp, Homo sapiens
ctggtgctctgggtctaccctacctgacatccttccagtcttatcctttgtttcctatccaggcccaggcttgtggctgagaacatccactttcagtcccatatacctgcctccaagtgtggtacagagaacttgggcctgctgggggcgcttagccttactctctccaccacctctcccaccaacccccagatgaactgcaggtagacgtttcttccttgcttggagccccagtttttgcatttcattttcattaaaatagaaaggtggtttggttttggttctaaggag

SEQ ID NO: 267 - DNA, 508 bp, Homo sapiens
  misc_feature 368, 404, 408, 434, 441, 495, 497, 500: n = A,T,C or G
aaaagcaattactgtacttatgtatcgaacttatttgtgtagcaactaattcatctgtgaagccatggtttgctgtggcttcacagtaaattttgacttaagtctaaagcgtgtgttagcatctcaccgtaacttaatgcttcgagtgagaagtttgaggaatgctgctttaggcaaaagagccactggaggaatgagctctgctcttttcacctgctctggactgctctcactttcctcaccgacaggaccacaggcttaagaactggctcagcagtccttctttagggtctagcgcctgcctaccagcttcctctacttctatcccgggacagatgaatgcttttcttaaaaatttttggaacatntgcttgattccttaccaaatgccttaaaaaactggnaagntcagctccgacatggacctcggccgnaaccccnctaaggcgaattccaccctggcggccgttcctaggggaccaactcggtcccacntngcnaatatggc

SEQ ID NO: 268 - DNA, 359 bp, Homo sapiens
  misc_feature 187, 337, 344, 347, 353: n = A,T,C or G
aaagagatttattaaatcatcttatcacaaagatggaaacatatacaaactagaaacatgcaaccatcatcttccacagtcaagtcacaatgtcaaatatttttcttgcctctgcagatgaaaagttcagatcttatacccaactacttactcaccccgaatatttaagtcagtcttcctgaaagtnctcagggtagcaagtaacaaaatgcaaacgattatataaagaaagtgcagttaaaaaggaaactatgtggcaagtaccctctttcccttcccaccccccaattaaaggcaaacaatggcactttgctcttgcttaacctaattgtcttcnaaaactnttnaaatgntaaaga

SEQ ID NO: 269 - DNA, 220 bp, Homo sapiens
  misc_feature 186, 190, 196, 201, 203, 209, 211: n = A,T,C or G
ccagcttcgagaaagagttgagaagttaaacatgctcagcattgatcatctcacagaccacaagtcacagcgccttgcacgtctagttctgggatgcatcaccatggcatatgtgtggggcaaaggtcatggagatgtccgtaaggtcttgccaagaaatattgctgttccttactgccaactctncaanaaactngaacngnctcctntntttgtttat

SEQ ID NO: 270 - DNA, 431 bp, Homo sapiens
  misc_feature 336, 364, 388, 390, 417, 419: n = A,T,C or G
ggcaggtctgcaagccattcgaataattcaagagagaaatggtgtattacctgactgcttaaccgatggctctgatgtggtcagtgaccttgaacacgaagagatgaaaatcctgagggaagttcttagaaaatcaaaagaggagtatgaccaggaagaagaaaggaagaggaaaaaacagttatcagaggctaaaacagaagagcccacagtgcattccagtgaagctgcaataatgaataattcccaaggggatggtgaacattttgcacacccaccctcagaagttaaaatgcattttgctaatcagtcaatagaacctttgggaagaaaagntggaaagggctggaaacttcctcccttncccccaaaaaaggaccttgggccncnaacccccctaaagggccaaattcccancncacttggcgggc

SEQ ID NO: 271 - DNA, 343 bp, Homo sapiens
  misc_feature 311, 315, 335: n = A,T,C or G
ccaaaggaatctgcagcaacttcttaaaatactgttaacatctttgggtttgctgaggcttgtcagtaacttacatcaaatcctcccaaaagaagatctgattagatagatatgactaaacggttttgtagtaataatccaattttacacattaatttgctgttgcaaatctgcccaaagctacaggtaatgaaaaataaagcaagtgtaaaatggatagtctgacacttaaaaatttatacaaagtggaagttaaagtttacatatttgaaaatcacatatacactaaattaccattatctgaatttttncaanacaaattgcaccatgaccanctacaaaa

SEQ ID NO: 272 - DNA, 340 bp, Homo sapiens
  misc_feature 223, 318, 325, 332, 333: n = A,T,C or G
aaattttgtagccattcttatgatgctcttgatttgttggttacacaaatcaattttattaaaaatccaaagataagtctttaggtatattttgtaccaaattaaattagaagataaaaattgtgctttcatagttgctacaaaggtaaataatggagagatttggtacaaaacaacaaaatatatatatattctcatatatatatatatagctgataaaatnacctgaggagtgtaatgtttatttttttgtgtatatctttgcaatctattttatatatattgacaaaagagactgtgaaatacttagccatgcanaatttgngaccagnnccagagc

SEQ ID NO: 273 - DNA, 627 bp, Homo sapiens
  misc_feature 300, 340, 374, 384, 386, 397, 423, 425, 432, 438, 442, 446,453, 486, 488, 489, 501, 503, 518, 525, 539, 555, 559, 566,575, 594, 596, 604, 608, 614, 617, 618: n = A,T,C or G
aaagcttccccagcaacgtcagcaagagttgcaaatcactgctcaacagaacctcttacgaagcaaaaacataaagaaaaataagccgggcagagtggctcacgcctgtaatcccagcactttggaaggcagaggcgggcggatcacctgaggttaggagttcaagaccagcctgggcaacatggtgaaaccccatctctactaaaaatacaaaaattagccgggtatggtggcaagtgcctgtaatatcagctcatgggaggctgaagcacgagaatcacttgaatcagggaggcagangttgcaacgaaccaagatcgtgccactgtctctagcctangtgacggagtgagcctccgtttcaaaaaaaaaanggaaaacccncnaattttggggncttggggaatagttaaaaattaaaangncccctcnttgggnttcntacnttttttnccttttgaaccttttgaaaccttcccaaaaatnannagtggtttaatntnttgtcccattctttntttaacngtttaagaaaaaanccttaaattgaagggncttnggccggnaaacccccnttaagggcgaaattcccancncccttggngggncggttnctnntgggttccc

SEQ ID NO: 274 - DNA, 169 bp, Homo sapiens
  misc_feature 151, 158, 160, 162: n = A,T,C or G
aaatgactgtgctgcccctttcacatcaaagaactactgacaacgaaggccgcgcctgcctttcccatctgtctatctatctggctggcagggaaggaaagaacttgcatgttggtgaaggaagaagtggggtggaagaagtggggtgggncgtctgngntntcttgag

SEQ ID NO: 275 - DNA, 430 bp, Homo sapiens
  misc_feature 206, 287, 325, 350, 363, 366, 383, 406, 412, 415, 419: n = A,T,C or G
aatgtgggctccaagcagatgcagcagatccgcatgtcccttcgcgggaaggttgtggtgctgatgggcaagaacaccatgatgcgcaaggccatccgagggcacctggaaaacaacccagctctggagaaactgctgcctcatatccgggggaatgtgggctttgtgttcaccaaggaggacctcactgagatcagggacatgtngctggccaaggacttcgagaaagcatacaagactgtcatcaagaaggacgagcaggagcatgagttttacaagtaaccctncccttccctccacccacaccacttcagggggcttgggntttttttcgcacccccagcaccctntatcccaaaaccncanttccctttttttttttnccccaaggattggggttcttcantaattngantaanaaccgaaatcc

SEQ ID NO: 276 - DNA, 290 bp, Homo sapiens
  misc_feature 236: n = A,T,C or G
ggcatcacgaaccatcctgcttcaagggagcctgcgggtctgactgcagcttcagctatgacctggagttcccgggcttctctgcggggcaccagtctgtatgctccattttagataataaaaattggcatattctggggtgggcaggatacggggttcacctgcagatgaacagggcaggaaaagcttgatggggtgtcgggggaatctggttggccttaaagggaatttggggncctgttcctgaatttggtaggcaagcatgcatgtaaggcttgaagtgggtttgg

SEQ ID NO: 277 - DNA, 542 bp, Homo sapiens
  misc_feature 373, 378, 397, 401, 403, 421, 436, 444, 450, 466, 475, 485,490, 491, 501, 511, 517, 525, 528, 538: n = A,T,C or G
ccaacaaacgtatggtggagtatgaagaggcccaggcatatgcagatgacaacagcttattgttcatggagacttcagccaagacagctatgaacgtgaatgatctcttcctggcaatagctaagaagttgccaaagagtgaaccccagaatctgggaggtgcagcaggccgaagccggggtgtggatctccatgaacagtcccagcagaacaagagccagtgttgtagcaactgagggggtggctagcagcaaacaagtatggagctagcacaagagctaagaaataacctccatccctacccctcagcacacagcccctacggtaaccagcacactgagccctggcttccaaaggcttgccttcctgacancttcntcatggcacttttttaacncttnancaaccaaacaccaaggcnagacctcgggcccgnaacccccncttaanggcgaaattcccagcncacttgggnggcccgtttncttannggggatcccnaacttcggtncccaanctttgggngtnaatcattggncata

SEQ ID NO: 278 - DNA, 394 bp, Homo sapiens
  misc_feature 319, 344, 347, 356, 365, 369, 372: n = A,T,C or G
aaaacagacatttaacatacacaagttatagtagcagtatgggcttctcctcccattggcaattaaatgcttttattttcttctgaaaagatgatgtggaccaacaggtatcagacttgccaacaaggtcggtagactcttcccagcatacatctgagcatgtcaaaatctctccttcctataggaaatttagctgagttttcttcatccccaatttctctcttttcttgtgttgatttagtattctgaactccattctcagctgggaaagctacagatccttttagtgcaagataaggttttatagccagattcagtngcagaccatgatttaagaaatctgnttnggaccctgngtcttttgnaacnttntttgtcctcttcgtgcttgaaa

SEQ ID NO: 279 - DNA, 493 bp, Homo sapiens
  misc_feature 348, 360, 375, 386, 389, 413, 416, 427, 449, 467, 472, 476: n = A,T,C or G
aaagaacctgttcattttccttttttgttaaaagtgctctaagaactaaaagggccgttccttactggaataaaattaactacacatgccatacatttctgggtcaatgttgctggttaaattccctcagaattagcaattcatagaaaattaattgttaagttatcgcactttcatgccaaaagtacaatttagagttcacaatacaaggctctgtggtataaagtgcctatgagcagcttcccatcatacactgaggctacagaacttccttggagaacagacccattgttggcataaactgtagtcactgtaggcttctcagatagaatgttctggatgccgganaacctctgaccnaaggaagattgttcnggtcatacacnaanactttttggacctgcccggccggncgntcaaaagggcnaattccacacattgcggccgtnctatggatccaactcggnccaanttgncgtaactggcatactgt

SEQ ID NO: 280 - DNA, 270 bp, Homo sapiens
aaaacaaaattagtggtaaaatagaaaaaggaaatgtttagtacagaaagtaccagccacagtaccctcataactccatctccttccccaggcatcactctttccagccacttcaatcctaaagcagtgagaccctcattttaacacacagagcctccctgcctaccctccttccctgtaacgtgagctactgtagtccatttattagttcttcggttaagcttcagtagacatttggagcacaattccaaaggtaaatcaatctatagg

SEQ ID NO: 281 - DNA, 150 bp, Homo sapiens
  misc_feature 7, 10, 25, 30, 38, 50, 51, 67, 81, 85, 111, 131, 136, 140: n = A,T,C or G
ggcaggngtnaggtcttcctctttnctganactggatntgttcaaacagnnaacgcccacagatggnccaaaggtggtggnagtnagggtgtgtgggtgtttttaaggttntctgtgataggacccatccnttcangggnggggggtgtc

SEQ ID NO: 282 - DNA, 300 bp, Homo sapiens
  misc_feature 247, 295: n = A,T,C or G
ctgtgagcaaaaggagaagtatcagcttctcaagggcctagggtttgttggaagggcaaggcaagggcaaagggggatacagaacaagggggcaagtaccagtgcctgggatggacccatccattcaggcagggggtgtggggtgtcccctgtgcttagaaaccacctagcatcatagctgcaacagcactttattgggatctgagtctacagttcacatagggaggtgaagccgtgggagaagcangggtaaaaaaaaaagggggggggacttcaccccctagggacagacctnggccg

SEQ ID NO: 283 - DNA, 545 bp, Homo sapiens
  misc_feature 470, 526: n = A,T,C or G
aaacttcagctcagtttcttaaccaagaaccacgtcaaccctccagggttgtggtttgtatttttgcctttaagcattatctcctttccaccaagaagcctacttaggtttaacacatgaaagcagtgtctaaaaattagatcggtcctaaattggaatgggatgtcttccttgcatgtcccataccagggaatttttttaacacacagtgtagagcctttgccagagatgttgaaagggagattaaaggcttgagggatgaatttgatcatcattcttaaagtcccttccaatcctgtgattctctgattccctgagtctcgtttattattggacatgcctagcccatcaccagtgacctgcccgcatattgctggcttcccttggataacggagagcctatcaccacatgcctttgttgtcttccatcatatcaagtgagttgctttctggactttttccatctaaancctgctaggtttggttttgagaaaagatggagaagtttcttttcatgagtttgtanggcaaaaaaaatacttttt

SEQ ID NO: 284 - DNA, 683 bp, Homo sapiens
  misc_feature 488, 583, 591, 592, 598, 605, 618, 621, 623, 628, 633, 634,648, 661, 662, 670, 672, 674: n = A,T,C or G
cctcaccaagtcttggctgtttctagctagctctataaacttttttcagcctctgttcattacccagttccaaagctgcttctacattttcagatatttgttatcagcaaaaaccccacctcttggtaccaattttcagccttactctgttttctgatgcatatagcagaatacttgaaactgtataatatataggaatcaaaatgtatttcctacagttacaaaggctgggaagtccaaggtggagagggcacatctggcaaaagtcttcttgctagtggggactctccactttggcagaggtggcacagggaatcagatggtgagggggaagaacatgctagctcaggtctgtttttctcttcttataaagccaccagttcctctccgatgataatccattaattcattaacccattaatcatggaagctcttaatttcctcttaaaggccctacctctcaaaactgtcatattgggggattaagnttcaacatgagttttggaggggctgaacattcaaactatagcataacacacatgctcacccttgaagatggaagactacaagcctctaaagcagnttcaactnncttccngatctgntgaaaaacaagcngananaatgnttttnngagagggaatcccncccctccttggannggaccttngnangcttaaaag

SEQ ID NO: 285 - DNA, 683 bp, Homo sapiens
  misc_feature 452, 604, 605, 626, 642, 661, 681: n = A,T,C or G
cgagcacgagctgtgaggggattcacttgtgtgcggaactcctcggaaccatggcgtccctttcccttgcacctgttaacatctttaaggcaggagctgatgaagagagagcagagacagctcgtctgacttcttttattggtgccatcgccattggagacttggtaaagagcaccttgggacccaaaggcatggacaaaattcttctaagcagtggacgagatgcctctcttatggtaaccaatgatggtgccactattctaaaaaacattggtgttgacaatccagcagctaaagttttagttgatatgtcaagggttcaagatgatgaagttggtgatggcactacctctgttaccgttttagcagcagaattattaagggaagcagaatctttaattgcaaaaaagattcatccacagaccatcatagcgggttggagagaagccacnaaggctgcaagagaggcgctgttgagttctgcagttgatcatggttcccgatgaaagttaaattccgtcaagattaatgaatattgcgggcacaacattatcctcaaaacttcttactcatcacaaagaccactttacaaagttagctgttnnaacagtctcagactgaaaggntctgcaacctggagcnattcatttatcaaaaactnggaggaagtttgcaatcctntt

SEQ ID NO: 286 - DNA, 415 bp, Homo sapiens
aaaatccctcaaaaactgtttattatacaagtgagttttgagtcacgatgggcttatcggtaggatttctggtagcgagcgcgggcaccagggcctccaaactttttggactcgcagcgacgagggtcagctaccagcagggtccggtcatactggatgaggatgtctttgatctccttcttggaagcctcatccacatatttctggtaataggccaccagggctttggagatggactgacggatagcataaatctgggccacgtgaccaccaccctttacacggacacggatgtctacaccagcaaatcgctccttgccgagaagcagaactggctccagcagcttgtactgtagcgtgcgcggctcaatcatctccaggggccgcccgttcaccttgatgagaccattgccgc

SEQ ID NO: 287 - DNA, 479 bp, Homo sapiens
ctgaggaagctcttcattggagggttgagctttgaaacaactgatgagagcctgaggagccattttgagcaatggggaacgctcacggactgtgtggtaatgagagatccaaacaccaagcgctccaggggctttgggtttgtcacatatgccactgtggaggaggtggatgcagctatgaatgcaaggccacacaaggtggatggaagagttgtggaaccaaagagagctgtctccagagaagattctcaaagaccaggtgcccacttaactgtgaaaaagatatttgttggtggcattaaagaagacactgaagaacatcacctaagagattattttgaacagtatggaaaaattgaagtgattgaaatcatgactgaccgaggcagtggcaagaaaaggggctttgcctttgtaacctttgacgaccatgactccgtggataagattgtcattcagaaataccatactgtgaatgg

SEQ ID NO: 288 - DNA, 538 bp, Homo sapiens
  misc_feature 1, 130, 352, 379, 402, 443, 477, 501, 510, 530: n = A,T,C or G
nccattgatttaggccactggcttagagtactccttcccctgcatgacactgattacaaatactttcctattcatactttccaattatgagatggactgtgggtactgggagtgatcactaacaccatantaatgtctaatattcacaggcagatctgcttggggaagctagttatgtgaaaggcaaatagagtcatacagtagctcaaaaggcaaccataattctctttggtgcaggtcttgggagcgtgatctagattacactgcaccattcccaagttaatcccctgaaaacttactctcaactggagcaaatgaactttggtcccaaatatccatcttttcagtagcngctaattatgctctgtttccaactgcntttcctttccaattgaattaaantgtggcctcgtttttagtcatttacctcggccgcgaccacnctaagggcgaaattccagcacactggcgggccgntacctagtgggatccccaacctcnggatacccnaggccttgggccgctaaatncaattggg

SEQ ID NO: 289 - DNA, 475 bp, Homo sapiens
ccactccctgaccccatcccacctccccagcagttcccgagggcagggctgaccgcagagctatcctctagtctccagaccacattatcgcttttcttctgttttctccaattgctgggtgtttgtgttgctcctcccacacaccccccagaaggacccccgaaggattatttggatgaacagtactcataaacaggaagcactggctacagttattctgaaaaatcccaaacgcaaaagggaggcaaagctgtctccaccctgcaggatgacaaaggcaatggccgcagagtggcttcggaccccacatgggaaccagatcagatctctctgggcttctgttttccttactgtaaaggctggagtgcagtggcacgatctcggctcactgcaatctctcaaccccaggagggttcaagcgattctcctgcctcagccttcccagaagctggaactacaggcgcccgccaccagg

SEQ ID NO: 290 - DNA, 327 bp, Homo sapiens
  misc_feature 1: n = A,T,C or G
nctgaggttgtcagtacaatgaaaccaaactggcgggatggaagcagattattctgccatttttccaggtctttgagttgcacgtcaaatctggggctgatcaccccacacttgtttagcctgcctgtgaggttcacaacaattttcccagctctgtggtcatcaatgatttcaaattcgccaatgtaaccatgcttcatcatcacagtgagaaaccggacgatgactttggagcacggcctaataagcacctggcgtttgcctctcttttcggcattgttgatactcttgagagcatctgccaggacattcatgcgcaccattgtg

SEQ ID NO: 291 - DNA, 688 bp, Homo sapiens
  misc_feature 543, 545, 669, 672, 674: n = A,T,C or G
aaatatcacaagtaggtcttaagtgtcatctggcatcttctttctgtagccaggtaactcttagatcttattcatcagcctgctgaacagttcctttttcagagacatagataccatccaaaaatttcctgatatccttgtttttaactgttgtggcttgctgaatcaaagccgctgaatttgaaacaagctcaatgtcatttccttcaaggattaattcatctttctgggcttgagatactgaacaagcaacacctggtctcatccgaaccctgcggatatatttttcacccaagaaatttcggatttcaacaagagacccattctcctggataacaacgttgatggggaagtgagcatacacagacctcatcttgtaacggaagcccagtgtaacacccttgatcatgttctgtacatgactacaaatagtccgaacggtagccagttcctttctgttaccccaccatttgtcaacccggagcctcttttttttttttccaagaagggctgagtctacatttgatgtgattgaagtccctncnaggggtcctctggggcccttcacgataactgtgcgtcccttcagagtaatgtcgacattttctggaatgtcgacagtctgattgctgagaatagtctttcattctcgcacctgccccgggcggnccnangggcgaaattccaa

SEQ ID NO: 292 - DNA, 213 bp, Homo sapiens
  misc_feature 69, 126, 141: n = A,T,C or G
aaaaataaaattataaacaaaatacagaaaaatattgacacctgtgataacaaggaaatgactcttaanggcagtttgttgtcctgggggaaaaaatcataagtgttataaagaaatattattgtncaaaggaggaatgtnatatttaaggttcatttacaacgggcatttggcgtcgacagaaaaagtctttctatgtatacattcaacatt

SEQ ID NO: 293 - DNA, 720 bp, Homo sapiens
  misc_feature 550, 631, 638, 652, 665, 668, 676, 679, 684, 689, 698, 701,704, 712: n = A,T,C or G
aaagagatttattaaatcatcttatcacaaagatggaaacatatacaaactagaaacatgcaaccatcatcttccacagtcaagtcacaatgtcaaatatttttcttgcctctgcagatgaaaagttcagatcttatacccaactacttactcaccccgaatatttaagtcagtcttcctgaaagtactcagggtagcaagtaacaaaatgcaaacgattatataaagaaagtgcagttaaaagggaaactatgtggcaagtaccctctttcccttcccaccccccaattaaaggcaaacaatggcactttgcccttgcttaacctagattgtcttcaaaaactattaaaatgtaaaagacttaacaaaaaaacaaaaagacgtttaacagatgtcaaaaagctccttagtgtttgaaaataaatgcttaaacaaaagacaacatattttatatcaaacaagtttgaagagccctgaattgcagcattctgtaacataaacaaacaaaaagctggtataggatttattgtcaaaggcagaatttcttcangcaggtaagtaaaggaggtgggggttcttttttcaggcattttcacggccctttcatagggttggcaaaaccgtacttganggaggtngctttcaaagggcnagggggtacccangcnaaattctnccngggcnaccgnttttccggngtngtntggaatgnttaattcc

SEQ ID NO: 294 - DNA, 680 bp, Homo sapiens
  misc_feature 563, 567, 586, 598, 601, 635, 637: n = A,T,C or G
aaatgaaggcaccaacaagaactactttcagatggtacagaatttcttatttcttgaagactctgtggttgaccacttcttcattagttacctgcagcaagacaccttcctgccaaaggaaaaaaaaagtatctgaagaagtttatcatgtttgtccaaaagaacctaaacaacttcagtggtggtcttaggatcaaagaagactcattggtgtatagagtaagccctgagtatcacattcctgtaaaggcaataaagccgggcaatcaaactgatcatatctaaggaatgaatttcaacagccaacctacaactttctcttcagggtaagacactgaactagaattaccacatttaacccacctatttagtactggatacataccaggcttcataatgcagacaagacacttcactcaagtatgaactactatctgaaaatagattcaaccatttttgccctaccttctttcagtctcatcctgataagcatgtacagttacaaccataaatacaacaaatgtctttaataaaaacccctagttcactcaaaatggttgatncaanaaatgtgaatcacaagggngtaaccatgggnaanctcatggaattatttgaaacttggcaggccttancntttttaccctacccattttttaccttccccaaaccccccccct

SEQ ID NO: 295 - DNA, 666 bp, Homo sapiens
ccaggctggttttgaactcctgacctcgtgatccacccgcctcagcctcccaaagtgctgggattacaggcgtgagccaccgcgcccggcaagaattcaaagttaaaacaggttaccactttcacctattaccatcaggttgcttatttttgttttatgttttttatttgtatgcatgtttactttatgtttcagtttactaccccctaaggcagcaagagagcaggaagataagcaaaatagagatgtttttgacaacttggcactgagagactatcctaagggaataatctgaaatacataaaaacattttattcacaaaattggtcatcacagcattatttacaatactgaaaatctggaaatagcctaaatttctaacaattgaaagaaggttaagtaaattataagactacacaataaaatatattaccagcaatatatctttgtgaaaatctataataaccacacataatacttagtaaaaaagaacataaattacatgataaagaatatgatcagaacaatgcaaaaaattcacacccccaaaaaagacaagatattatatggcaatttcgtggtaaaatattcatgtatttgtgctgcatttctaatttttccgtaactgacacatcagttttataattaggaaaaaaatacctttta

SEQ ID NO: 296 - DNA, 691 bp, Homo sapiens
  misc_feature 423, 432, 480, 556, 566, 572, 578, 589, 590, 593, 614, 618,627, 641, 643, 644, 655, 658, 662, 665, 682, 685, 690: n = A,T,C or G
aaaaaatgaaatgggaagattgtcaggaaattaggatagctactctagtataatttagaaaaactaagcaagagattctccagttgctagtgagtaagcactctgatttgagaaatgtgtggggacaatggagaaaagttttcagaaaactgctatgtagatttctgaatgtgttgtattttgctgaggaattcggtaacaactgaaagggaaaagtgcttcagccatcttttgaaaacaagttaaaattctggaacttgtatctgtaatacatcctaactcttgtaaaagaaaataatttatcatagctggtgtcctttcattgaaagttgtaatactgtctctaaggagggaggaaaagattattatataattttataactggcaacatttgagttagtattgactttgtctaaaagaggnttgacttcnactgggataaaaatgtcagtgaattttgttaaagtagtaaaaatgcangtgacttagtcggaacataaaattatttgctaataagataatattgcctcctaccaaataaaccgggatttttagnaatatctganggattngttgangggcggagttnnacngtatttggcctagaatttggnaaangtcacttgnatgtcaatatggcngnncaatgttgaanggnttcntanaaacgacttttttctgnccnccccnc

SEQ ID NO: 297 - DNA, 699 bp, Homo sapiens
  misc_feature 663, 676, 689, 693: n = A,T,C or G
gcatttacgcattcctccagtcttaataatcacatgcggacccacagcgccaaaaaaccattcacgtgtatggaatgtggcaaagcttttaagtttcccacgtgtgttaaccttcacatgcggatccacactggagaaaaaccctacaaatgtaaacagtgtgggaaatccttcagttactccaattcgtttcagttacatgaacgaactcacactggagagaaaccctatgaatgtaaggagtgcgggaaagccttcagttcttccagttcctttcgaaatcatgaaagaaggcatgcggatgagagactgtcagcataaggaatgtgggaaaacctaaaggtgtccctgttctctctgaagacatgaaaactcactggggagaaaccctatgaatgtaaaaatgtggaagcaactttgtatctcaggtcttaatgaacacatatgaattcacagtggagaagaccctgcatcagggaatgtggaaatgactttgctgaattctcaagccttaccaaacacatcagaaatctcctggagagaaactgtatgaatgtagaagaatcttgggaatacctttctgaatcccacaaaccttaatgggtgtatgtgaacctcacattggagagaaaaccctgcattttaccctgcccggggcgggcnctccgaaaagggncgaaattcccagnaccncttggg

SEQ ID NO: 298 - DNA, 691 bp, Homo sapiens
  misc_feature 557, 569, 584, 588, 620, 622, 636, 638, 643, 648, 654, 661,665, 670, 678, 680, 686: n = A,T,C or G
ggatgtcatcagcattgacaagacgggagagaatttccgtctgatctatgacaccaagggtcgctttgctgtacatcgtattacacctgaggaggccaagtacaagttgtgcaaagtgagaaagatctttgtgggcacaaaaggaatccctcatctggtgactcatgatgcccgcaccatccgctaccccgatcccctcatcaaggtgaatgataccattcagattgatttagagactggcaagattactgatttcatcaagttcgacactggtaacctgtgtatggtgactggaggtgctaacctaggaagaattggtgtgatcaccaacagagagaggcaccctggatcttttgacgtggttcacgtgaaagatgccaatggcaacagctttgccactcgactttccaacatttttgttattggcaagggcaacaaaccatggatttctcttccccgaggaaagggtatccgcctcaccattgctgaagagagagacaaaagactggcggccaaacagagcagtgggtgaaatgggtccctgggtgacatgtcanatctttgtacgnaattaaaaatattgnggcngggattaataacacaaaaaaaaaaaaaaaaancnttccccgggggggncnttttnaaaangggggncaaaatntttnccccnccaccccncnttgggnggggg

SEQ ID NO: 299 - DNA, 391 bp, Homo sapiens
  misc_feature 349, 354, 360: n = A,T,C or G
aaatctcatttggttaccttgagtcctggaacatgcagtaactgtcatgctatagacatcatctgtatttggctgggaatacaaatgaagattgtggtgtattcaagcagtagggtttttgcttttgtttttgttttagtgccaacaaaacttttttttgtctgactacattaaagataagactgactatatttatacaacagaaactttgtaatagattttttcagctttgtgaaatcgaattttttttcatcagggctggttggatttcctttttaccctgtaatccaagcgttaatagtttgttagaagatgggttattgcatgtcactttttttttttgtaaaanaaaancttccnttttaaaaaaaaaaaaaaaaaaaaaaaaaaa

SEQ ID NO: 300 - DNA, 341 bp, Homo sapiens; identical to SEQ ID NO: 20

SEQ ID NO: 301 - DNA, 687 bp, Homo sapiens
  misc_feature 1, 2, 586, 626, 664, 669: n = A,T,C or G
nnaaaggtccaaaagcctgccaacccctgggaattctacattgggacccagttgatggaaagactaaagccatctatgcagcacatgtttatgaagttctattctgcccacttattccagaatggcagtgtattagtaggagagctctacagctatggaacattattaaatgccattaacctctataaaaatacccctgaaaaagtgatgcctcaaggtcttgtcatctcttttgctatgagaatgctttacatgattgagcaagtgcatgactgtgaaatcattcatggagacattaaaccagacaatttcatacttggaaacggatttttggaacaggatgatgaagatgatttatctgctggcttggcactgattgacctgggtcagagtatagatatgaaactttttccaaaaggaactatattcacagcaaagtgtgaaacatctggttttcagtgtgttgagatgctcagcaacaaaccatggaactaccagatcgattactttggggttgctgcaacagtatattgcatgctctttggccttacatgaaaagtgaaaaaatgaaggaggagaatgtaancctgaaggtcttttttagaaggcttcctcatttggatatngtggaatgaattttttcatgttatgttgaatattccanaatgncatcatcttccatctttg

SEQ ID NO: 302 - DNA, 691 bp, Homo sapiens
  misc_feature 464, 490, 518, 548, 566, 577, 611, 612, 640, 647, 660, 671,675: n = A,T,C or G
ggcgcctctgcgcgcgggaagatggcggaacaggctaccaagtccgtgctgtttgtgtgtctgggtaacatttgtcgatcacccattgcagaagcagttttcaggaaacttgtaaccgatcaaaacatctcagagaattgggtcattgacagcggtgctgtttctgactggaacgtgggccggtccccagacccaagagctgtgagctgcctaagaaatcatggcattcacacagcccataaagcaagacagattaccaaagaagattttgccacatttgattatatactatgtatggatgaaagcaatctgagagatttgaatagaaaaagtaatcaagttaaaacctgcaaagctaaaattgaactacttgggagctatgatccacaaaaacaacttattattgaagatccctattatgggaatgactctgactttgagacggtgtaccagcagtgtgtcangtgctgcagagcgttcttggagaagnccactgaggcaggttcgtgccctgctgngggcagcctgactagaccccccctgagggnctgcatttctcaatcggngtgtaatcacnttccaagggccaaagcccagctcttttgttcaanntgacttactgtttcttaccttaaaaagnaattgtngatggaaatcaantgtgtttggcngggngaaattaataaaaatt

SEQ ID NO: 303 - DNA, 385 bp, Homo sapiens
  misc_feature 363: n = A,T,C or G
aaatctcatttggttaccttgagtcctggaacatgcagtaactgtcatgctatagacatcatctgtatttggctgggaatacaaatgaagattgtggtgtattcaagcagtagggtttttgcttttgtttttgttttagtgccaacaaaacttttttttgtctgactacattaaagataagactgactatatttatacaacagaaactttgtaatagattttttcagctttgtgaaatcgaattttttttcatcagggctggttggatttcctttttaccctgtaatccaagcgttaatagtttgttagaagatgggttattgcatgtcactttttttttgtaaaataaaaacataccttttnaaaaaaaaaaaaaaaaaaaaaa

SEQ ID NO: 304 - DNA, 632 bp, Homo sapiens
  misc_feature 169, 200, 529, 573, 574, 588, 627: n = A,T,C or G
ccaagtcaaaattgggcccagcgtctttctttctgtcttatgacagaccagcctccagccttggtgtggtatctacatgtagccctgcgtaccctgcttctttttagcattcaaggcccactcagggcctcaaattagccaatggtgaatatggatataggacttttanagggatgcaggttgagttgtacataacttanaggtgaagtgcaggtccgaaacagggctagactttggagaactgtaaaatggctcactgagcatgacagcatcaggacccctggagtggctttcaaacttaccttcttctgcaggctacttctggaaatccctaggacttaccagctttctgaacactgcgcatcatgggagggtgaagaggaaaaggggctagttaaaatcttgcttctactgtgggccgaactcaggaggagccctaaagctaagcccttgggcttgacagctctacttttcacctctaactaccactgtgccaatgagtgccgagtgccaagatcagacctcgggncgcgaccccctaagggcgaattccagcacacttggcggccgttnntagtggatcccaanctcgggtacccaagctttgggccgtaaaatcaatggggncatta

SEQ ID NO: 305 - DNA, 696 bp, Homo sapiens
  misc_feature 562, 596, 617, 644, 650, 665, 672, 684, 689, 693, 695: n = A,T,C or G
aaaactgactaggtcaaaaatagttacgcctgcaggttgacctattcagactttgccaaactcctccaagttcaatataaattgacgttttcagagtacaaagtcaattttacggaaacgctgttcctccttttccatggagccaatctgggtaattttttcattaaaattcttcttctgcctgtttgctgcggaactctttgagctgctgtagccgctcgatagtttcagaaatggtgcgttccccgtggaccttattgtctcttgtgcggatattaacagtgccactgattttctctttttcaccaacaactaaaatgaagttatactgtgctaactgtgcatttcgaatctttttattcaatgtacagcctggatccagatcaatgtctgccatgaatttggcatcgtggaattgttgtcgtaccttttgggcatattcatcacaggttggtcccactggaactaccattacctggcgaggggacagccaaaagggccatttgcccccatagttttctgtgaggatagcaatcattctttccactgatcccaagatggntcgatgaacaatcactggccttttcttatcatcnccatcatggcttacataagtnagaataaatctgatgggcaactggganatccanaacctcggggccgcnacccccncttaaggggccnaattncagncnc

SEQ ID NO: 306 - DNA, 430 bp, Homo sapiens
  misc_feature 377, 401, 405, 412, 413, 419, 426: n = A,T,C or G
ctggaggatgcatttctgaccccatcccagacacgtgaaagcagaagacatgatgcatctataataatgaaagcacaatctaaagagtattatcacaccgtgaacagcttcttcctgacccagagcaaatattaagagaaagacaatatatttacaaacaagatttaataatgctcacaagaatagagtttgcccccaaatggaaaattacacattattttgtttcaaaaagttataaatttagtgcttgaaaaatccagcaggtaagtagaaggactaacagggtctgtttctggaactgtccgccagcaaatgagcatgctctgtcctggaagccatttttctttttcttttttttttttttttttttttttttnaaaaaaaaaatttttttttttttncccnggggggnnaaaaanggggaantttt

SEQ ID NO: 307 - DNA, 693 bp, Homo sapiens
  misc_feature 535, 552, 558, 607, 624, 629, 638, 668, 679, 680, 683, 691: n = A,T,C or G
ggaaaaaaaattagaggatgaagccaaaactaacacattctaaagaattgcaaggaaagcaactatgtaattctgttgaaaaaggaaagctcaggaaatactctttttatttcttttgattctagctgtctgcgagcctggctgtggtgcacatggaacctgccatgaacccaacaaatgccaatgtcaagaaggttggcatggaagacactgcaataaaaggtacgaagccagcctcatacatgccctgaggccagcaggcgcccagctcaggcagcacacgccttcacttaaaaaggccgaggagcggcgggatccacctgaatccaattacatctggtgaactccgacatctgaaacgttttaagttacaccaagttcatagcctttgttaacctttcatgtgttgaatgttcaaataatgttcattacacttaagaatactggcctgaattttattagcttcattataaatcactgagctgatatttactcttccttttaagttttctaagtacgtctgtagcatgatggnatagattttcttgtttnagtgcnttgggacagatttatattatgtcaattgatcaggttaaaaattttcagngtgtagttggcaggatnttttnccaaaattnccatgcatttatgggggtcttgggggggcngggggaacatnnggnaaaggttnaa

SEQ ID NO: 308 - DNA, 295 bp, Homo sapiens
ctgagtatgtcccagagaaggtgaagaaagcggaaaagaaattagaagagaatccatatgaccttgatgcttggagcattctcattcgagaggcacagaatcaacctatagacaaagcacggaagacttatgaacgccttgttgcccagttccccagttctggcagattctggaaactgtacattgaagcagaggttactattttattttattttttcttatatcagtattgcagcattcactgtagtgatagaaaacaagttaggaacatagccaattaggacaaggaggattt

SEQ ID NO: 309 - DNA, 58 bp, Homo sapiens
  misc_feature 21, 29, 31: n = A,T,C or G
gcaggtaaaatgttcatgtcnaaaattantnaactataggaatagctctatgagaaca

SEQ ID NO: 310 - DNA, 366 bp, Homo sapiens
  misc_feature 1: n = A,T,C or G
nctgcaagccattcgaataattcaagagagaaatggtgtattacctgactgcttaaccgatggctctgatgtggtcagtgaccttgaacacgaagagatgaaaatcctgagggaagttcttagaaaatcaaaagaggaatatgaccaggaagaagaaaggaagaggaaaaaacagttatcagaggctaaaacagaagagcccacagtgcattccagtgaagctgcaataatgaataattcccaaggggatggtgaacattttgcacacccaccctcagaagttaaaatgcattttgctaatcagtcaatagaacctttgggaagaaaagtggaaaggtctgaaacttcctccctcccacaaaaagg

SEQ ID NO: 311 - DNA, 635 bp, Homo sapiens
  misc_feature 1, 2, 452, 562, 565, 566, 576, 579, 597, 607, 627, 629: n = A,T,C or G
nnaaaaactgactaggtcaaaaatagttacgcctgcaggttgacctattcagactttgccaaactcctccaagttcaatataaattgacgttttcagagtacaaagtcaattttacggaaacgctgttcctccttttccatggagccaatctgggtaattttttcattaaaattcttcttctgcctgtttgctgcggaactctttgagctgctgtagccgctcgatagtttcagaaatggtgcgttccccgtggaccttattgtctcttgtgcggatattaacagtgccactgattttctctttttcaccaacaactaaaatgaagttatactgtgctaactgtgcatttcgaatctttttattcaatgtacagcctggatccagatcaatgtctgccatgaatttggcatcgtggaattgttgtcgtaccttttgggcatattcatcacangttggtcccactgggaactaccattacctggcgaggggacagccaaaagggccatttgcccccatagttttctgtgaggatagcaatcattctttccctgatcccaaganggnntcgatgaacnatnactggcccttttcttatnatccccatcntggctttacataaagtaaanantaaatc

SEQ ID NO: 312 - DNA, 446 bp, Homo sapiens
  misc_feature 361, 392, 420, 426: n = A,T,C or G
aaaaatatataatgttttattgtcaaaaatagacaaactttaatttcctttaacaggaatattaatttaacagccttccataagccatcaccattttgtaagcataacaggcaagagagtcaaagataactgttagtgggaaaaggacaacagttctacatccatgcccaagaagccttgcccagtcagtggtgacaactccaggacagcggcagaaacacagtgaacctttggagcttaacaatagccatgcaaaacaacatagatttatcttggcccaattctataaagattggctttgtagtatctttccaagcatttgaagagtttagtttggtagaacactgctaatttgaccagngacatttttaggtcacttatagtatcagtanccagggatcacccccctggtttttttanggttanccacccccggggatggaaaa

SEQ ID NO: 313 - DNA, 290 bp, Homo sapiens
  misc_feature 1, 2, 189, 207, 243, 253, 256, 261: n = A,T,C or G
nnctgtgatgggcttctctggctttggttccaccaagaagagttactgaggctttctgtgcttggcctgactttggcctatgctggacctaactttgcgtgtgtgtgtgtgtagtagggggtcatttctttttgggtaatgggaaagttcttaagagtgtcaatggggagggatagagggtgggggctnatggtttccctctacttngggagagggcacagattgcagaggtaatgctgtggnatattgcttntgnctcantgtatcactggagtcacaggaccctgccc

SEQ ID NO: 314 - DNA, 481 bp, Homo sapiens
  misc_feature 1, 2, 275, 277, 403, 409, 412, 439, 440, 469, 475: n = A,T,C or G
nngttttacaaggacacctacaacaagctgaaaaccaaggatgagccccagcgggaaacgctgaaagccatccactatgcgttgaactgctgtggtttggctgggggcgtggaacagtttatctcagacatctgccccaagaaggacgtactcgaaaccttcaccgtgaagtcctgtcctgatgccatcaaagaggtcttcgacaataaattccacatcatcggcgcagtgggcatcggcattgccgtggtcatgatatttggcatgatcttcantntgatcttgtgctgtgctatccgcaggaaccgcgagatggtctagagtcagcttacatccctgagcaggaaagtttacccatgaagattggtgggattttttgtttgtttgttttgttttgtttgtngtttgntgntggttattttgccactaattttagtanncattctgctttgctagataaaagctgaantgaccnaggtgt

SEQ ID NO: 315 - DNA, 646 bp, Homo sapiens
  misc_feature 416, 429, 433, 434, 440, 446, 472, 490, 492, 493, 544, 568,576, 582, 584, 593, 606, 608, 609, 626, 637, 638, 639: n = A,T,C or G
ccttattgaagatgaatggatcaccattgataaatttaccagattcactgatgttcctttagctgcgggatttcagtggtacctttctcaaactcaacttagtaaactaaaaccaggtgactggtctcagcaagacataggtactaatttggttgaagcagataaccaagcagagtggaccgatgttcagaagaagattatcccatggaacagtcgtgtttccgacttagacctggagctcctgtttcaggatcgtgctgccagacttggaaagtcaattagtagactcatcgttgtggcctcgctcatcgacaaaccgaccaatttaggaggactgtgcaggacctgtgaggtatttggggcttcagtgctcgttgttggcagccttcagtgtatcagcgacaaacagtttcagnacctcagtgtctntgcnnaacagnggcttnctctagtggaggtaaaaccacctcanctaattgattatctgcancnnaagaaaacagaagggtataccctcctttggaattggaacaaactgccaaangtttagacctaacccaatattgcnttcctganaaattntntgctcttgncgggaaatgaacntnngggaattgccgcaatgngacccaccagnnngggccct

SEQ ID NO: 316 - DNA, 313 bp, Homo sapiens
  misc_feature 3, 10, 20: n = A,T,C or G
ctncaagggncctggtttgnatctaagcaaacacccagatggggttctctggtctcagcaaggcttttcctgttgggagtcacagtaaacagaaacccaaaaatctcatcttgggtgttttcagggcttgttttgagttttgctgaatagggagcgcaagacgccctgagcctccctctcactggtggtgataagaggagccgtctggtgtgtcagggtcacgaacccgttacatttcaggacgatcctttttccttcagcagcatttcttactggctgtggctggaatctgccttttatcacagacctgccc

SEQ ID NO: 317 - DNA, 528 bp, Homo sapiens
  misc_feature 504, 509, 515, 520: n = A,T,C or G
ccacgtccatcggagtgtccttctcggtgggcgacggggtgcctgaggctgagaaggacgcaggggagcccgagaacacctatattctgcggcctgttttccagcagaggttcaggccctctgtggttaaagactgtatccatgctgtgctcaaggaggaactggcaaatgctgaatattctccagaagaaatgcctcagcttacaaaacatttatcagaaaacattaaagataaattaaaagaaatgggatttgaccgatacaaaatggtggtgcaagtagtgattggagaacaaagaggtgaaggagtattcatggcttctcgctgtttctgggatgctgacactgacaactatactcatgatgttttcatgaatgacagtttattctgcgttgtagcagccatttggctgtttctactactgaatgaatctttgaaaagctggtaaaagacatgaccatgaagaaatctcaactttttaatatttgttaaatatcttgacnaaatnaagatnttagntagttccg

SEQ ID NO: 318 - DNA, 224 bp, Homo sapiens
  misc_feature 1, 2, 216: n = A,T,C or G
nnaaataaattcacacaaagaaagagaaatagaaagcgacggtagtgaccagcaagaggaataataattacattcatcttaatgtgtgtgtgccagttctgtttacattaacattggaaaactccagacctggaatccagaacctcaaatctgtgagtggaatgtcttgagatgggcacgtggaagtcaaagggtttctcttttttttttttcccnttttaaaa

SEQ ID NO: 319 - DNA, 393 bp, Homo sapiens
  misc_feature 266, 273, 276, 278, 302, 309, 319, 335, 338, 364, 372, 375,387: n = A,T,C or G
aaataatacagaacaattaaagctaaccaagtgcaacagataaataagcctgccagttatacacataactttataccaaccataattcagccagtcaaaattccaaaaacaatccaaataacttccaacatactagcggtcaaactaccgaataaacttgatgcagaccagtattcccaagttgcaatagtatccaatgactttgctgaaatgcataaaatggacaagcctaggtatctgcgcaaccagcaggtttttttttttgnccaaggntananaatgcctggtaaaagcttgaccanaaaactntcaaaagtanctgttctgccttactnttnttaaaatacttaaaatttgaataaanaacctacnggntatgtaacattntaaggt

SEQ ID NO: 320 - DNA, 369 bp, Homo sapiens
  misc_feature 1: n = A,T,C or G
naaaaattattatcaaacatgcacatgcttgtacacacacacacacacacacacaaacaggggcatttgtaaaggtgtccctggaatgtaagatttataatgtttaaggcaaggtgaaggcattgccaagtgtgtgtcgctcataagactagtgtatattcactgaaagttaacctgatgatttgttattgtttgaaccatatgctgatttgcttctggtttctgtttagtgtgttctctctgataaggggctgaaagattctgcatcacacatcctctgagacctaccatgtcgcacactttgttaatgacaaacttcactctacactatacagtaccttgttgatatattcagtaaagtcttatttt

SEQ ID NO: 321 - DNA, 618 bp, Homo sapiens
  misc_feature 394, 481, 488, 499, 507, 518, 524, 533, 550, 557, 560, 564,569, 574, 575, 586, 587, 604, 605, 607: n = A,T,C or G
aaaagatgtagataaaattttattaataacagaagacttaaaaaacattggaaatacttttttcaaatcccagaactgggagatggctattaaaaaatatgcagaagttttaagatacgtggacagttcaaaggctgttattgagacagcagatagagccaagctgcaacctatagctttaagctgtgtactgaatattggtgcttgtaaactgaagatgtcaaattggcagggagcaattgacagttgtttagaggctcttgaaatagacccatcaaataccaaagcattgtaccgcagagctcaaggatggcaaggattaaaagaatatgatcaagcattggctgatcttaagaaagctcaggggatagcaccagaagataaagctatccangcagaattgctgaaagtcaacaaaagataacgccagaaagataaagagaaggcagtatatgcaaaaatgttgcttagaaaggattcngttgccntatttgggtgnttgattgnattaaattgcnattaanaaaatggtnaaaggggtttttgggcntgggggnaantatngaaanccccnnaaaaggggggnntttcccctttttttggnncnacccccctttc

SEQ ID NO: 322 - DNA, 495 bp, Homo sapiens
  misc_feature 408, 415, 422, 438, 444, 449: n = A,T,C or G
aaaacaaagatctatcacccaaacatcgacgaaaaggggcaggtctgtctgccagtaattagtgccgaaaactggaagccagcaaccaaaaccgaccaagtaatccagtccctcatagcactggtgaatgacccccagcctgagcacccgcttcgggctgacctagctgaagaatactctaaggaccgtaaaaaattctgtaagaatgctgaagagtttacaaagaaatatggggaaaagcgacctgtggactaaaatctgccacgattggttccagcaagtgtgagcagagaccccgtgcagtgcattcagacaccccgcaaagcaggactctgtggaaattgacacgtgccaccgcctggcgttcgcttgtggagtactaacttttctacagtttttctttattcnaaaaagnggccttnggggtaacccctggtnaaaagnaaaangggattttaaaaaaaaattttttaaaggaaattgtttttccccccg

SEQ ID NO: 323 - DNA, 88 bp, Homo sapiens
aaataatggttgtataaaattgcagcagcaagaaacccaaaggagaatagctctaggggagggaggtggatgagtatgcatggggggg

SEQ ID NO: 324 - DNA, 504 bp, Homo sapiens
aaattacccagtctcaggtatgtctttattagcagcatgagaatggactaataccccaggacaaggccaagatgggagttcatgctcctgaccagagggaaggtggagatgagcagagagcactctcctccaaaagagttgatttctaaatgaaaggaaaaagcaaacacaaataagaaaagatttgcagaaatcaattagaataaaaatgtcaacagacaataacagtgttgcatagcttgaacatttttatattgattaaattgtttttcagtagaatcactgacagaacaggtcagaatgaaaaacattccaaatatacagaaaaaagattactgctcagttaaggtccttttccaaataacttcacacaaatcctttggttgctccaaacagaatgagagctatgagaatggtggcccagcccggccatcagactcccaagcatttggtccccggtctgaggtcacagaatctttgcccctttaccgagactgctctcag

SEQ ID NO: 325 - DNA, 160 bp, Homo sapiens
  misc_feature 42, 45, 84, 125, 126, 144, 148: n = A,T,C or G
atagggaactcaatgcataactatataatttgaagattatanaanaagggaaatagcaaatggacacaaattacaaatgtgtgntcctgggacgaacacatctttgaaggtcatgagtttgttannttaacatcatatatttgnaatnttgaaacctgga

SEQ ID NO: 326 - DNA, 129 bp, Homo sapiens
cctgccagtctctggacggctacggcgtagggtggcaggcacaatctccgggggcagatgaaggtaatcacggagatactggataccctcattggtaaggtaccagtagaaatgtctccaggcaaactg

SEQ ID NO: 327 - DNA, 364 bp, Homo sapiens
  misc_feature 141, 155, 220, 231, 232, 233, 241, 279, 281, 287, 291, 297,313, 318, 323, 328, 329, 338, 341, 346, 351, 354: n = A,T,C or G
ccaggactcggttcagagggtcccgcatgttgaccgtgtggagctgagaggctgagagggagctgctcatggatcggtctgtggggctcgaaaggatgttggcatcgtcctcattagagctcagcagtcgcatcaacttcnaaggctgcacatcntccagggggaagaggctgatagaccaaatttttcattttctttcttgctaggactgtatgcaaancatgaaactannnaatgcgcnaaaatgaatctctcttcctatatattaatactaacctntntctttntttnctttanggtgatctttactttnacagncatcncaaanncccttatancanccttntccantgnatggaccact

SEQ ID NO: 328 - DNA, 601 bp, Homo sapiens
tgttgcctgggctggacgtggttttgtctgctgcgcccgctcttcgcgctctcgtttcattttctgcagcgcgccagcaggatggcccacaagcagatctactactcggacaagtacttcgacgaacactacgagtaccggcatgttatgttacccagagaactttccaaacaagtacctaaaactcatctgatgtctgaagaggagtggaggagacttggtgtccaacagagtctaggctgggttcattacatgattcatgagccagaaccacatattcttctctttagacgacctcttccaaaagatcaacaaaaatgaagtttatctggggatcgtcaaatctttttcaaatttaatgtatatgtgtatataaggtagtattcagtgaatacttgagaaatgtacaaatctttcatccatacctgtgcatgagctgtattcttcacagcaacagagctcagttaaatgcaactgcaagtaggttactgtaagatgtttaagataaaagttcttccagtcagtttttctcttaagtgcctgtttgagtttactgaaacagtttacttttgttcaataaaagttttgtatgttggcattt

SEQ ID NO: 329 - DNA, 415 bp, Homo sapiens
ccacccagtactttgctgacagggacatgttctgtgctggccgagtacctgaggaggatctgaagaggacaatgatggcctgtggaggctcaatccagaccagtgtgaatgctctgtcagcagatgtgctgggtcgatgccaggtgtttgaagagacccagattggaggcgagaggtacaatttttttactggctgccccaaggccaagacatgcaccttcattctccgtggcggcgccgagcagtttatggaggagacagagcggtccctgcatgatgccatcatgatcgtcaggagggccatcaagaatgattcagtggtggctggtggcggggccattgagatggaacttctccaagtacctgcggggattactcaaggactattccaggaaaacaagcagacctcgggccg

SEQ ID NO: 330 - DNA, 337 bp, Homo sapiens
ggaccttctgcggccgatgagaagaagaaggggcccaaagtcaccgtcaaggtgtattttgacctacgaattggagatgaagatgtaggccgggtgatctttggtctcttcggaaagactgttccaaaaacagtggataattttgtggccttagctacaggagagaaaggatttggctacaaaaacagcaaattccatcgtgtaatcaaggacttcatgatccagggcggagacttcaccaggggagatggcacaggaggaaagagcatctacggtgagcgcttccccgatgagaacttcaaactgaagcactacgggcctggctgggtgagcatgg

SEQ ID NO: 331 - DNA, 352 bp, Homo sapiens
  misc_feature 1, 341, 343: n = A,T,C or G
naaataatccaggcaggagaagagaggagggcacacttggaactcccctccccacaatacgtgattatttacattttagtaattggacaatcccggctcaggaggaggttgcaagaatctgcaaaagttggagggagcgccccaggagaacaaacagcaagccttatttcccctagcccatcccccaaaaaaccatccatcccatcctagtgtctggtggtgtccggtggtgtccatcttccattccttcccaaattatggaagtaaggttcttctcaccagaataagagcacttgggataacagagtagggtcccctcacccaaaaaaaaaaaaaaaaancnttgggggaa

SEQ ID NO: 332 - DNA, 368 bp, Homo sapiens
  misc_feature 1, 2: n = A,T,C or G
nngtgacattggcccctagaccctctctatagccatgagactccttgtggcctcaagaaatttagacgcccacgacagcactacacagcatctccaggtgatgcccaaggcacagggctgcagaaaataaacctccagattccaccaacacgggtccattcttcctggtgatggcagaggggcttcttttagctagtttgatcttttgggagtctgtctttccttagccgtctgagtgagctgtgtatgaacaagtcccaggagttccaagagtctagagtggtttttgcagcatgggttgagtgtacaaagcctactgtgcgtgagatcctctccttccgtttctgaaatctcttactcaggtaagg

SEQ ID NO: 333 - DNA, 132 bp, Homo sapiens
  misc_feature 58, 68, 118, 124, 127: n = A,T,C or G
ggggcgggaagtggcaggaaatggcgaaagcctcaggaatgtttccaccagggaaggntgggcaaacngggccaggaggaatgcccagacaagaactctggttagggggaggggaatnacacancanaacca

SEQ ID NO: 334 - DNA, 418 bp, Homo sapiens
  misc_feature 135, 371, 384, 393, 394, 400, 403: n = A,T,C or G
ctggatgaggaggagaggatgagaatggcagaaggaggagttactagtgaagattatcgcacgtttttacagcagccttctggaaatatggatgacagtggttttttctctattcaggttataagcaatgccttnaaagtttggggtttagaactaatcctgttcaacagtccagagtatcagaggctcaggatcgatcctataaatgaaggatcatttatatgcaattataaggaacactggtttacagttagaaaattaggaaaacagcggtttaacttgaattctctcttgacgggtccagaattaatatcagatacatatcttgcacttttcttggctcaattacaacaggaaggctattctatatntgtcgttaagggngatctgccnnattgcnaanctgaccaactcctgc

SEQ ID NO: 335 - DNA, 644 bp, Homo sapiens
  misc_feature 414, 445, 492, 527, 566, 580, 588, 589, 597, 599, 605, 607,615: n = A,T,C or G
aaaatatcttctttctccaaagagtccattgcgcatttcttagagtagagatggggacacattccaggcaaggtcacaatggcattttgttgccctcaatgctgattttcactgcgtgtgcagatctgctttttttccttatatctgtgaactttctcatctgtttatccagtcgactgatacccttcttggaggtcgcctgaaactaagagtaagggaaaaattaaagagcaaactactgaaatacgtaagtctagttatgtctttcatcttcttataactgagttagcaaccagaagagcttctagctctggaataaccagaatgtgtgttgatgacctcaagaacaacaaagcaagtatagatggtgttagaaacgcgtattaaactctctcagtgaagaataattctgtngtctgtgctttatttttaattttgctgcagnccacggaggtctcctagatgggagaaagagggggggaaactgagacnatgatcctcccaattccctcatggtccattacgtnttaactgcatgccgtttcccttttcgaagacccaaatgnggaaccctagccgntttgacanngcaccttncnaaaccngnggcttggncataaaaaaaaagaaatgaacccttaaaa

SEQ ID NO: 336 - DNA, 343 bp, Homo sapiens
  misc_feature 1, 2, 78, 84, 146, 183, 190, 203, 218, 273, 275, 279, 286,291, 307, 314, 319, 324: n = A,T,C or G
nncctgggggggatggtatatggccctttccccaccaggcgctaaggggaacacccccttccccaggtcttttatttntttaanttatttttgcacaaatgactcttttatatttaattcgatttcattgcctcccttcttaaagncaacaggctcagtttacaaacctgtgagctactgttngctgctnccctccttcccantgaaaggtacaaagnaataagcatcatgcatcctccccttacccctccaacacccctctgcctctggctnangttnctcaaancacanatcctctcttaccccntccccangtttnaaacncatatcctcatttcaaacg

SEQ ID NO: 337 - DNA, 377 bp, Homo sapiens
  misc_feature 205, 211, 215, 229, 232, 236, 240, 245, 248, 279, 312, 358,359, 363, 371, 372: n = A,T,C or G
ctgcagctcccacctccagcctgcagtatcctgctgacaaacttcctgtgtaccttaccagcaggacaccagattggcacagtcagtcccttgttccaaaaattggaaaatgaccagattgaaagtttaaggcagcgctttggagggggccaggtgagaaagctaaaggctgtgccctcgctccacaacagccacagcatcactnacctantttncctaaacagatctnacncatnactntttcnatnttttggacctgccgcttcctcacttacagtntttctttcctgtcttaactagaagagaccttcnacttaaaggtaacctgggtaccatatgaaaaggctcaatgaaattnnaccntgacggannatatt

SEQ ID NO: 338 - DNA, 493 bp, Homo sapiens
  misc_feature 1, 2: n = A,T,C or G
nnccaagaggagcaattttcgtgccatcagcaaaaagctgaatttgatcccacgtgtggacggcgagtatgatctgaaagtgccccgagacatggcttacgtcttcagtggtgcttatgtgcccctgagctgccgaatcattgagcaggtgctagagcggcgaagctggcagggccttgatgaggtggtacggctgctcaactgcagtgactttgcattcacagatatgactaaggaagacaaggcttccagtgagtccctgcgcctcatcttggtggtgttcttgggtggttgtacattctctgagatctcagccctccggttcctgggcagagagaaaggctacaggttcattttcctgacgacagcagtcacaaacagcgctcgccttatggaggccatgagtgaggtgaaagcctgatgtttttcccggccagtgttgacatcttccctgaacacattcctcagtgagatgcaggcatctggcacccag

SEQ ID NO: 339 - DNA, 489 bp, Homo sapiens
ctggatgaagttgtgtcagagaaccagaggcttaaagtccctagtccaaagcgaagagttgtctgtgtgatgatagtattggcatttataatactgaactatggacctatgagcatgttggaacaggattccaggagaatgaaccctagtgtgagccctgcaaatcaaaggaggcaccttctaggattttctgctaaagaggcacaggacacatcagatggtattatccagaaaaacagctacagatatgatcattctgtttcaaatgacaaagccctgatggtgctaactgaagaaccattgctttacattcctccacctccttgtcagcccctaattaacacaacagagtctctcaggttaaatcatgaacttcgaggatgggttcatagacatgaagtagaaaggaccaagtcaagaagaatgacaaataatcaacagaaaacccgtattcttcagggtgctctggaacagggctcaaattctcag

SEQ ID NO: 340 - DNA, 286 bp, Homo sapiens
  misc_feature 267, 269, 271: n = A,T,C or G
ctgaatggtgctgacggtggagctcacagagctcctgcattctcaaggtttggatacattctgggaagggtgaactggtgtaagagtcacataatacgtggaggggtgtaataatcaaaaaaacatagcaaaacaccttctgtgcctgagccagggttgagggagccgagaagaaagtccacagctctgccacacgggccagcagtgctcatgtctgctggctgatcctccccaaagcctctcctgccacctttttttttttttttnancnaaacaaaagggcaaa

SEQ ID NO: 341 - DNA, 640 bp, Homo sapiens
  misc_feature 640: n = A,T,C or G
aattgtcggtgttaacaaaatggattccactgagccaccctacagccagaagagatatgaggaaattgttaaggaagtcagcacttacattaagaaaattggctacaaccccgacacagtagcatttgtgccaatttctggttggaatggtgacaacatgctggagccaagtgctaacatgccttggttcaagggatggaaagtcacccgtaaggatggcaatgccagtggaaccacgctgcttgaggctctggactgcatcctaccaccaactcgtccaactgacaagcccttgcgcctgcctctccaggatgtctacaaaattggtggtattggtactgttcctgttggccgagtggagactggtgttctcaaacccggtatggtggtcacctttgctccagtcaacgttacaacggaagtaaaatctgtcgaaatgcaccatgaagctttgagtgaagctcttcctggggacaatgtgggcttcaatgtcaagaatgtgtctgtcaaggatgttcgtcgtggcaacgttgctggtgacagcaaaaatgacccaccaatggaagcagacctgcccgggcggccgctcgaagggcgaattccagcacactggcggcccgtactagtggatccgagctcn

SEQ ID NO: 342 - DNA, 651 bp, Homo sapiens
  misc_feature 109, 131, 308, 584, 622, 644: n = A,T,C or G
ccaattaaaatatatagcaataacagtatcattaatactggaacaataaatgatacaaattaatcctaaagcatacagaaaaaaacatcatatgaaagttactttctangctcagttattctaaacttggntaaaatatgcaacttgaattctaatgcatccttctcatttgaactaaaggattattctgcggacacaaatttgttcctaaaatttcaatcaaatggggtctctgcatatcccacaactgcttcctaatgacttcctaccctccagttacacataatcataatgtctaaacaacacantttaggattccaaaattataaggccattcaagtttcttcaatctctaacatgcaggatctctatcaaaatgggagattaatttttgatatgaatatcagatgaaagataatgaaatttgtataagatcagcactaatacatataataagatcaacatttttacagaattatttctttagatttagaaagaatacacatttcgaacacttgaaagagggctacacatggtaagttatcatctgccagtatcaaaaatgatgtgttgaaaacccctgngggaaatgagttaatgaagtcacacaggacctgccccngggggggcccttcgaaaagggngaaatct

SEQ ID NO: 343 - DNA, 487 bp, Homo sapiens
cctttccatttttatcttgtatttttccactcttttggcagacctgcatgggcaaggacgtaacccttcacgtctcagcaagcaaccccgctatgctactgtaccagaagtttggattcaagactgaagaatatgtattagatttctatgataaatattacccattggagagtacagagtgtaaacacgcattctttctgaggctccggcgctgatgcgaatacagctcacagagaaacgcatgtgctattggagaacaggtctttgtggagatctaaaggcagtgattgatttcacagggagctctaatctctgtgattacatggtccttcaaactcccaaccaaagtgagaaaagcggcaggcagtgaaatgagcagtgagcagccctttagcaaaatcgccctccagtccttcctggagatgccttcagccagcatcccagactccacagttatttatgaatgatgtcgtgattctccctccac

SEQ ID NO: 344 - DNA, 395 bp, Homo sapiens
gcctgaagtcacatcggctgcatcattttcattcaaaagccctgcagcttccagttttggatcacctggattttcaggacttccagcttccttggcaacaggtcctgtcagagctccagtggccccagcctttggaggtggcagttctgtggctggttttggtagtccgggctcacattctcacactgctttttctaagccatccagtgacacttttggaaatagcagcatatccacttctctgtcagcctcaagcagcatcattgcaacagataatgtgttattcacacccagagataaactaacagtagaagaactggaacaatttcaatccaagaaatttactctgggaaaaattccattaaagcctccacctctggaacttctaaatgttt

SEQ ID NO: 345 - DNA, 571 bp, Homo sapiens
  misc_feature 160, 162, 438, 498, 500, 519, 530, 539, 546, 564: n = A,T,C or G
aaagatgttttcttgaattatttagaacatggtaagcctggtattttttaatcaaacaaaatatttatgaaatgggttttctcttaattctggattcatcatggctttctaataccaattgtaatatttacaatattcaccaaaacttagaattttgcanangctggaattctgccagtgtttctttgctaagccttgcatgcaaaatttgaaattttaacattggcacccaaaacctacatggaatgtatgtctggagtatttcaaactttacattgaaacataatttccttggaaaacaaaccataagcctgaggaggtttttatcaactggaatgctttatattaggtttgtttttcactgtacattcctcattttacattcatttaacctgccaattatttaatttttttattgtaaagtagtttttagcattngcttttatttttttactttgatgcctttcaaaattgggcatgtctttacctgcccgggcngncgctcgaaagggcgaattnccagcacactngggggccgntactagngggatcccaagctcgggncccaaac

SEQ ID NO: 346 - DNA, 494 bp, Homo sapiens
  misc_feature 8, 15, 21: n = A,T,C or G
ggcggccnggcaggnccattnacagtatggtatttctgaatgacaatcttatccacggagtcatggtcgtcaaaggttacaaaggcaaagccccttttcttgccactgcctcggtcagtcatgatttcaatcacttcaatttttccatactgttcaaaataatctcttaggtgatgttcttcagtgtcttctttaatgccaccaacaaatatctttttcacagttaagtgggcacctggtctttgagaatcttctctggagacagctctctttggttccacaactcttccatccaccttgtgtggccttgcattcatagctgcatccacctcctccacagtggcatatgtgacaaacccaaagcccctggagcgcttggtgtttggatctctcattaccacacagtccgtgagcgttccccattgctcaaaatggctcctcaggctctcatcagttgtttcaaagctcaaccctccaatgaagagcttcctcag

SEQ ID NO: 347 - DNA, 501 bp, Homo sapiens
aaatatcacaagtaggtcttaagtgtcatctggcatcttctttctgtagccaggtaactcttagatcttattcatcagcctgctgaacagttcctttttcagagacatagataccatccaaaaatttcctgatatccttgtttttaactgttgtggcttgctgaatcaaagccgctgaatttgaaacaagctcaatgtcatttccttcaaggattaattcatctttctgggcttgagatactgaacaagcaacacctggtctcatccgaaccctgcggatatatttttcacccaagaaatttcggatttcaacaagagacccattctcctggataacaacgttgatggggaagtgagcatacacagacctcatcttgtaacggaagcccagtgtaacacccttgatcatgttctgtacatgactacaaatagtccgaacggtagccagttcctttctgttaccccaccatttgtcaacccggagcctcttttttttctttc

SEQ ID NO: 348 - DNA, 304 bp, Homo sapiens
ctgtagccgagagtcaccaggtccccacagggtgtcagagagggtgtggagctgcttagcactcagcatcactgtctggttaaacacagtccagatgacaccctgggcacagggcggtgtagtcagagacccctcatattggaggtagcggctgaagtcagagggcaggagtgtagatatgtccagtcctgggacctgagtctctgagccttcctcagcgatttcttccaagcgagacagcaactgctcataggcactgttttcttccgggccctcctccagaaaggcggccaacacggccagg

SEQ ID NO: 349 - DNA, 511 bp, Homo sapiens
  misc_feature 458, 494, 500: n = A,T,C or G
gctatgcatctgaacaagtgggtctctcccttgagcaccaggagtgggtgccagccggccccgaggattcccagcaccccacctatggtcttgccagcataggcttgctagttccttcttggtcagaggtagctgcagaggggggaggccaagggtttggtctaagctgtgccctgccacctggcaggaggcccactcactgcccaagtcatggcaacaggctggagcagcccaggagatgggcctaaaatgttctggatcccttgggtcctagtgttatgttccagtctgcccacctgtgctcaggatgcagccctgggatccagcacccatggaagcttctgctgggatggtgtcacctatgggttttgaaccagtgtggtatggtccttgggagctctgctctgagcttgccacactgctgagagcacccacttgtcctgaccagggtctcagtnggtcctgacccccaatgtgggcaggggcttgggcangagggngggggtctgct

SEQ ID NO: 350 - DNA, 536 bp, Homo sapiens
ctgtaacaagtgaggggtgcaactgaaggtacagcatttgcctgcaggccaagcggtctctggttcaaatccatgtgcctcccaccccccttcagttttctacttattgaacaaaagccttttcacctcgggtctattatactggaatcttcctgcaaggagagaagagaggatagacagcatagagctttgccaggaagcctctctagtttcttgtaggccccagtgaacttctccaggcgactctgtcccctcattaacccttatcctcagagccttgaaatgggcccaattgtcccatagaactgatgtttatggtttttcttgaataaacctagaaattgaccctctcagtcttgaaacccaaggagaaatttacatttatgtcatctgaattcctttctcaggaaaccagccagcaatcctcccagacggtatcaagaaactgaaatttaccagatccccacatctggaaagtgagaagccagacccctcacccatcatgattccccaggtgaccacctgctgcctgttgg

SEQ ID NO: 351 - DNA, 364 bp, Homo sapiens
  misc_feature 1, 214, 216, 312, 345, 351, 358: n = A,T,C or G
ncctttatacacatatgtctacacatagggatttggatgatctcgggatcccacatcctcgctgtcccctgtccccccgcaacatcccccaccaatacctttctgaagttttctagtccctcctttttgtttgtgctccttaaagcccagccccatgcctgactttggttcccagtgagcattgtacatttgtggatattaaatctttggcaangncatttacctgggctggaatagggctcttggctgattctttttcctaaacacccacccaatgggagaggctgatactcaacatgcaaaccttgtgtnttatttctccaggcgaagggatgttggaagacnttctgnaaggggnggggtg

SEQ ID NO: 352 - DNA, 396 bp, Homo sapiens
aaatatcacaagtaggtcttaagtgtcatctggcatcttctttctgtagccaggtaactcttagatcttattcatcagcctgctgaacagttcctttttcagagacatagataccatccaaaaatttcctgatatccttgtttttaactgttgtggcttgctgaatcaaagccgctgaatttgaaacaagctcaatgtcatttccttcaaggattaattcatctttctgggcttgagatactgaacaagcaacacctggtctcatccgaaccctgcggatgtatttttcacccaagaaatttcggatttcaacaagagacccattctcctggataacaacgttgatggggaagtgagcatacacagacctcatcttgtaacggaagcccagtgtaa

SEQ ID NO: 353 - DNA, 230 bp, Homo sapiens
aaacttgatccaacctctttgcatcttacaaagttaaacagctaaaagaagtaaaataagaaggcaatgcttgtggaatgtacagtgcatattggcggcgcacgcctcattacgattcgcctgcttgcttctcctgttcaatcgtttctttggaaggcagtggatttttctcttgcgtctctgtcttcttcagtttcgacttatcgaatttctcgatctcagccatatcg

SEQ ID NO: 354 - DNA, 289 bp, Homo sapiens
  misc_feature 1: n = A,T,C or G
naaagcaaatacaaaacagaacagaggattcaaaccgcaagtatgggagatttaggccctgcagaggcagaccattccttagtatctcacaaagcagagtaatactggaggcagagtagggggtggttggagagcagttagtacaaagaggcagaacagtgtctggtttacttggcatacacagaatctgcactgccggttccagaactgcaaagttggtgaactacaggagatgtgggtatttagactccaaagtttatactgagctcagtgcctgggaccgctccag

SEQ ID NO: 355 - DNA, 647 bp, Homo sapiens
  misc_feature 1, 538, 595, 598, 602, 614, 635, 645: n = A,T,C or G
naaacatggataaaagtattacatgggtccactgttaaaacagacaacatgtggcaaattaattctggtatcatgttttccaacaaagcttagaaaataaaggtgttgaggtggctttggactaagtttaatagtcatctcctctgctgacaacttctttacatgttggacgcaacaggatggtatgttcaaattgcgctgtatatgatcctttaatgtcacataatggtggatatggatctacaatgcccaagtcacacagattcttcagagccatcaagtatttactttctcccaagcgatccagccatctgcggcagaaggcaagggttccaaagttttcattgatgacatttaacaagtgttttgttcttggaagccttattggcacatgtccaacatcaaaatttttcatgtaatgtgaacattccatatcatcatgaacaacaccttttcctgtactaccaaatgtttcaattgcatatacttctccttcctccattcttgttgcctcccctcctttcacaatcggcactgnttttccagcatgtattctatattgcccaattgaatgtccatttagattacgggattnggnttcncttgatatgtcnttcccatctatttcaacttcntaggactccntt

SEQ ID NO: 356 - DNA, 331 bp, Homo sapiens
gccgccgcttgtgctgcagccatgtctctagtgatccctgaaaagttccagcatattttgcgagtactcaacaccaacatcgatgggcggcggaaaatagcctttgccatcactgccattaagggtgtgggccgaagatatgctcatgtggtgttgaggaaagcagacattgacctcaccaagagggcgggagaactcactgaggatgaggtggaacgtgtgatcaccattatgcagaatccacgccagtacaagatcccagactggttcttgaacagacagaaggatgtaaaggatggaaaatacagccaggtcctagccaatggtctgg

SEQ ID NO: 357 - DNA, 336 bp, Homo sapiens
ggcaggtccaacatgaggaacagcaagctgaaggacatccggaacgcctggaagcacagccggatgttctttggcaaaaacaaggtgatgatggtggccttgggtcggagcccatctgatgaatacaaagacaacctgcaccaggtcagcaaaaggttgaggggtgaggtgggtctcctgttcaccaaccgcacaaaggaggaggtgaatgagtggttcacgaaatacacagaaatggactacgcccgagctggtaacaaagcagctttcactgtgagcctggatccagggcccctggagcagttcccccactccatggagccacagctcaggcag

SEQ ID NO: 358 - DNA, 668 bp, Homo sapiens
  misc_feature 574, 631, 650, 656: n = A,T,C or G
aaaggtccaaaagcctgccaacccctgggaattctacattgggacccagttgatggaaagactaaagccatctatgcagcacatgtttatgaagttctattctgcccacttattccagaatggcagtgtattagtaggagagctctacagctatggaacattattaaatgccattaacctctataaaaatacccctgaaaaagtgatgcctcaaggtcttgtcatctcttttgctatgagaatgctttacatgattgagcaagtgcatgactgtgaaatcattcatggagacattaaaccagacaatttcatacttggaaacggatttttggaacaggatgatgaagatgatttatctgctggcttggcactgattgacctgggtcagagtatagatatgaaactttttccaaaaggaactatattcacagcaaagtgtgaaacatctggttttcagtgtgttgagatgctcagcaacaaaccatggaactaccagatcgattactttgggggttgctgcaacagtatattgcatgctctttggcacttacatgaaagtgaaaaaatgaagganggagaatgtaagcctgaaggtcttttttagaaaggcttcctcattttgggatatggnggaatgaattttttcatgntatggntggaatatttct

SEQ ID NO: 359 - DNA, 648 bp, Homo sapiens
  misc_feature 581, 587, 647: n = A,T,C or G
caggccgtaggaggaagatggcggtggagtcgcgcgttacccaggaggaaattaagaaggagccagagaaaccgatcgaccgcgagaagacatgcccactgttgctacgggtcttcaccaccaataacggccgccaccaccgaatggacgagttctcccggggaaatgtaccgtccagcgagttgcagatctacacttggatggatgcaactttgaaagaactgacaagcttagtaaaagaagtctacccagaagctagaaagaagggcactcacttcaattttgcaatcgtttttacagatgttaaaagacctggctatcgagttaaggagattggcagcaccatgtctggcagaaaggggactgatgattccatgaccctgcagtcgcagaagttccagataggagattacttggacatagcaattacccctccaaatcgggcaccacctccttcagggcgcatgagaccatattaaattctatttactatttgttgaatttatttttccgtcagttatgtaaaataaacatactcttcttcctcccctgattattgccattaagcctttacctgcccnggcggnccgctcgaaagggcgaattccagcacacttggccggccgttactagtggatccgagctcnt

SEQ ID NO: 360 - DNA, 670 bp, Homo sapiens
  misc_feature 492, 540, 557, 565, 567, 586, 593, 599, 601, 618, 621, 625,662: n = A,T,C or G
ctgacatttattattttggtttcattttcctttttgcgtctttatgtttctttcgacaatccatacgcaggttggttgttctggcctcccaagagttcctgctcatattacttcctactcctctccagaataagtcagaaccttgaagtcgttcatcattcttagagaaaaagaaaaatctagtggtctctttctcaagtaatgatgcttctctgaaaagaaagggacaaaggagagagaaaaataggtattggttggtttaatttcaatatttaagaagaaatatttacattcaaaacataaatacactatttcttaaatatatcttttttcatttccccctagaatccaggtgagcgagactcttaaatatatctgctttgtattttgtgcattttgccctgagttaaaacaaccctccctctaacattcttctatctgaagctttgataatgaagacttgtttaagtagaacctctatctttcctgtgnttggttgctgatactctcactcccaccattgctaccccattttgccantgcctcccatggggtangcacccangncaaacctgcaacatcctgntttcccngaccangnggacttccacttggcanggngccnccccttcccccttttttcttatgcccccaaaaccttntctttccc

SEQ ID NO: 361 - DNA, 566 bp, Homo sapiens
  misc_feature 474: n = A,T,C or G
gcatttacgcattcctccagtcttaataatcacatgcggacccacagcgccaaaaaaccattcacgtgtatggaatgtggcaaagcttttaagtttcccacgtgtgttaaccttcacatgcggatccacactggagaaaaaccctacaaatgtaaacagtgtgggaaatccttcagttactccaattcgtttcagttacatgaacgaactcacactggagagaaaccctatgaatgtaaggagtgcgggaaagccttcagttcttccagttcctttcgaaatcatgaaagaaggcatgcggatgagagactgtcagcataaggaatgtgggaaaacctaaaggtgtccctgttctctctgaagacatgaaaactcactggggagaaaccctatgaatgtaaaaatgtggaagcaactttgtatctcaggtcttaatgaacacatatgaattcacagtggagaagaccctgcatnagggaatgtggaaatgacttttgctgaattctcaagccttaccaaacacatcaggaaatctcacttgggagagaaaacccgtatgaatgtag

SEQ ID NO: 362 - DNA, 612 bp, Homo sapiens
  misc_feature 553, 560, 603, 604: n = A,T,C or G
aaaatactttatttagccaaatggtttcttgaatcttagctacagagaaatttttacattaaagaacatcatgattatcacaacaacttacttagcacttgcgtgtactaagtgctgcactaagacattgtagtttccagtgtcttgaaccaacctgggaaaaatatcagtggtgagggttcagtgtttgtatatggaggatggtgcaaactgaattattcccataaagctgcttggtaattccagagaaagcacacagccaccttctcattagaaggagggtagggataggtgttatggtgaaaaactgagatgctgctggatcccaggccagaggacctaaagaaatactctctccattaggagcccaccctgtggaggaactcgagcctactccagatggggactgggtaggaacatcagtgccatttttcttcagatgaatattgtagacccagaaggaagcaccttgtaagcaggaaaaataaatttgtgctgaaataatggatgtaaaatacttctccctgtccactattgtcaaaacacctgcccngggcggncgctcaagggcgaaattccagcccactgggcgggcgttacttnngggatccc

SEQ ID NO: 363 - DNA, 607 bp, Homo sapiens
  misc_feature 127, 466, 493, 527, 528, 529, 545, 549, 553, 556, 580, 581,596, 600: n = A,T,C or G
cctgggcttcagtataagctcctatctcagtctggccccgttcatgccccagtcttcacaatgtctgtagatgtggatggcacaacatatgaagcctcaggaccatccaagaaaacagcaaaacttnacgtagcggtgaaggtattgcaggcaatgggatatccaacaggctttgatgcagatattgaatgtatgagttccgatgaaaaatcagataatgaaagtaaaaatgaaacagtgtcttcaaactcaagcaataatactggaaattctacaactgaaacctccagtaccttagaggtaagaactcagggccctatcctcacagcaagtggcaaaaaccctgtaatggagctcaatgaaaaaagaagaggtctcaagtatgaactcatctcagagactggtggaagccatgacaagcgctttgtaatggaggtagaagtagatggacagaaattcagaggcngcaggtccaaataagaaagtggcaaangcgagtgcagctttagctgccttggagaaactgnnntctggaccccaatgcnggcnaatnatnagaaaaaagaagattattccttcnnggcaaaagggcgttngggnaatacca

SEQ ID NO: 364 - DNA, 399 bp, Homo sapiens
ccagctccccaatcaatctccagtactcattgaacttgagctccgagtcctgattcacatccaagctcttcatcttctcatcaagagagcccacatccttgagcagatggggcaactgctgggtaaccagctctttgaactcgttgacgctgaggctatccttccggccctcctgccttgcaaaggtgaagaaggtggtgaccacggtctcaatggactcctctagctctgtcagtggttctgctgccattaggaccctgaggccaaagctgatgtcctcaaggggctagctgacctttgtcagggctgacccggcaaggagatggggtagagtgagctggagcctcagggctgaggtttataagcagcggggaaggaggagagagctgcttccaagcc

SEQ ID NO: 365 - DNA, 529 bp, Homo sapiens
ccacgtccatcggagtgtccttctcggtgggcgacggggtgcctgaggctgagaagaacgcaggggagcccgagaacacctatattctgcggcctgttttccagcagaggttcaggccctctgtggttaaagactgtatccatgctgtgctcaaggaggaactggcaaatgctgaatattctccagaagaaatgcctcagcttacaaaacatttatcagaaaacattaaagataaattaaaagaaatgggatttgaccgatacaaaatggtggtgcaagtagtgattggagaacaaagaggtgaaggagtattcatggcttctcgctgtttctgggatgctgacactgacaactatactcatgatgttttcatgaatgacagtttattctgcgttgtagcagcatttggctgtttctactactgaatgaatctttgaaaagctggtaaaagacatgaccatgaagaaatctgaactttttaatattgttaaatatcttgacaaaataaagatgttagtagttcgaaaaa

SEQ ID NO: 366 - DNA, 453 bp, Homo sapiens
  misc_feature 57, 401, 403, 408, 411, 425, 429, 434, 441: n = A,T,C or G
aaagacaaaaaaattcttttatgtacaatatcttgtctagagtctagcaaatatagnacctttcattgcaggatttctgcttaatataacaagcaaaaacaaacaactgaaaaaatataaaccaaagcaaaccaaaccccccgctcaactacaaatgtcaatattgaatgaagcattaaaagacaaacataaagtaacttcagcttttatctagcaatgcagaatgaatactaaaattagtggcaaaaaaacaaacaacaaacaacaaacaaaacaaaacaaacaaacaacaaaatcccaccaatcttcatgggtaaactttcctgctcagggatgtaagctgactctagaccatctcgcggttcctgcggatagcacagcacacgatcatactgaagatnangccanatntcatgaccaccgcnatgncgatncccactnccccggatgatg

SEQ ID NO: 367 - DNA, 502 bp, Homo sapiens
ccatccgcaacgacgaggagctcaacaaactgctaggccgggtgaccattgctcagggcggcgtccttcctaacatccaggccgtgcttctgcctaagaagaccgagagtcaccacaaggccaagggcaagtgatttgacaggtatctgagctcccggaaacgctatcaaacccaaaggctcttttcagagcccccctaccgtttcaaaggaagagctaacctcactgcttgtaggtagaaggaaaaaaggcactaaggttgcaaaagcttctcatttcagagagatgccaggatcctaactgcctgccaaacttaccaattctaaggaataagtggatggatggcattactgattcctacattactgattgattctgcatccgcaaattgttttattaaaaacattctacatcatgtgtggggagataaggaggataaaatgaagagaaagaatattattgaggggaagttcttctgaatacaaaatgtgtttaatttttt

SEQ ID NO: 368 - DNA, 695 bp, Homo sapiens
  misc_feature 1, 525, 532, 533, 553, 573, 585, 599, 602, 618, 645, 646,655, 657, 669, 677, 678, 688: n = A,T,C or G
naggagagtcagaaacaaacttatagtgatgcgttggaaggttaatcgaaaccatccttacccctatttaatgtagtttaccttgatttttatctgatattaacaataccatatagcttgctttttattagcatttcctgatattcctttgtccatatttctacttataacctgttgctattaatggttttagatgtatctcttgttatctgcatctcattgtttattgtattttgaaccaatctacaagtctctgtcttttaataaaagaactttacacatttgtaaaaaagaggttcttggtaagatataaaatggaaaaaggctaagtaatatgtgaatatcatatttttgaaaggtaaaaagtacatttgtatattacatatatggacataacttgtgaaggatgaaagaaagtacagcctctcggtggtgggattatgaatgatttttctccttttgcttgtttgtattttctatattcctaaaattaacacacattattattgctagaataataaaagnttttatnnaaaaaaaacctttgggccgngacccccccttaagggggcnaaatttcccaancaccaccttgggcnggnccggtttccctaaggnggggaatcccccgaagcctttcggggnnaccccaaangncctttgggggcngttaaaanncattgggggnccattta

SEQ ID NO: 369 - DNA, 473 bp, Homo sapiens
cgacaaacaaggtttccccatgaagcagggtgtcttgacccatggccgtgtccgcctgctactgagtaaggggcattcctgttacagaccaaggagaactggagaaagaaagagaaaatcagttcgtggttgcattgtggatgcaaatctgagcgttctcaacttggttattgtaaaaaaaggagagaaggatattcctggactgactgatactacagtgcctcgccgcctgggccccaaaagagctagcagaatccgcaaacttttcaatctctctaaagaagatgatgtccgccagtatgttgtaagaaagcccttaaataaagaaggtaagaaacctaggaccaaagcacccaagattcagcgtcttgttactccacgtgtcctgcagcacaaacggcggcgtattgctctgaagaagcagcgtaccaagaaaaataaagaagaggctgcagaatatgctaaacttttgg

SEQ ID NO: 370 - DNA, 289 bp, Homo sapiens
ggcatcacgaaccatcctgcttcaagggagcctgcgggtctgactgcagcttcagctatgacctggagttcccgggcttctctgcggggcaccagtctgtatgctccattttagataataaaaattggcatattctggggtgggcaggatacggggttcacctgcagatgaacagggcaggaaaagcttgatggggtgtcgggggaatctggttggccttaaagggaatttggggtcctgttcctgaatttggtaggcagcatgcatgtaaggcttgaagtgggtttgg

SEQ ID NO: 371 - DNA, 466 bp, Homo sapiens
  misc_feature 43, 56, 57, 64, 69, 74, 126, 159, 162, 262, 280, 286, 354,365, 382, 391, 402, 405, 419, 424, 433, 440, 448, 457: n = A,T,C or G
gggggcaggtcctaagttataatccttcctcctcacagccccntttccccaagggnntttaccnccagngcagntttctagctgtaaacaatgccaccagcatgagtgatagtgtccctgtagggngctcccacttctcaaggaccaaatacaccttancanaggccaaggtttcctgacaaagtgaatgggggcaaacagaaaatgcacaggtgcaaacatggaatagaatggtagttgatgattggtctgaggtgcctanaaactgagttaaatctanctctanccatgaatgaagaaaaccttttcttattttctatttggagcctcttgacaaaaaaaatcttgagaggntcctgaccaanggacctgagggatttcngggggtttntttcccctaanggnaatcggaattggcntgccntaccttaanctaaatnaaaaatancccttttcncataaataa

SEQ ID NO: 372 - DNA, 280 bp, Homo sapiens
  misc_feature 42, 44: n = A,T,C or G
aaatcaactgatttgtatggaaaatgacacggcaaataaatnanacctatgttaaagcgaaggtcagctaaatatccaaacttaaggatataatgggcaccgataaacagattccacagtcttctttaatagagtatctttcaaacacaactttgctagaaactggtccaaagatcgacagcacgtgggaatgcttaacaggggtggtgatcagggacacgtttcctgggtgccgctttgatgatgttgtccacacgcagaatcacctctgctgcttcag

SEQ ID NO: 373 - DNA, 721 bp, Homo sapiens
  misc_feature 313, 336, 441, 453, 464, 466, 487, 491, 502, 512, 513, 514,532, 533, 540, 563, 568, 578, 583, 586, 588, 597, 610, 613,616, 620, 625, 645, 646, 653, 674, 703, 720: n = A,T,C or G
ccaattaaaatatatagcaataacagtatcattaatactggaacaataaatgatacaaattaatcctaaagcatacagaaaaaaacatcatatgaaagttactttctaggctcagttattctaaacttggctaaaatatgcaacttgaattctaatgcatccttctcatttgaactaaaggattattctgcggacacaaatttgttcctaaaatttcaatcaaatggggtctctgcatatcccacaactgcttcctaatgacttcctaccctccagttacacataatcataatgtctaaacaacacagtttanggattccaaaattattaagggcntttcaagtttcttcaatcttctaacatgccaggatcttcttttcaaaaatggggaaaaataaattttttggatttgaaattttccaaaaggaaaagaataattgnaaaattttggtnttaaagaatcncnccccttaattccctttttaantaangaatccaccanttttttaccnnnaaattaattttctttttnnaattttngaaaaggaaatccccctttttcnaaacnctttgaaaanaaggnctncncatggtaanttttcatttgccnatntcnaaangaggngttgaaaaccctgggaaagnntaagaanccccgggcctgccgggggccntaagggaatccccaccggggcgtctaggnaccatcggccactgggna

SEQ ID NO: 374 - DNA, 178 bp, Homo sapiens
  misc_feature 36, 42, 58, 64, 72, 92, 96, 98, 103, 107, 119, 143, 155,166, 169: n = A,T,C or G
cttccaacttattaaaggggggcccggaaaaatttngggggncgccccttccttaagnaatggnccaattgnccttcgggaagaccgggccnccgncnccagnttgntgggaattgggnattattctttgcccaagaaaaatntccgcccttttnaggccggcggncgnggggggggg

SEQ ID NO: 375 - DNA, 649 bp, Homo sapiens
  misc_feature 527, 534, 538, 597, 602, 618, 624, 636, 639: n = A,T,C or G
gggcaggtccagacaatgaatgagaagcaactcttccatgggacagatgccggctccgtgccacacgtcaatcgaaatggctttaaccgcagctatgccggaaagaatgctgtggcatatggaaagggaacctattttgctgtcaatgccaattattctgccaatgatacgtactccagaccagatgcaaatgggagaaagcatgtgtattatgtgcgagtacttactggaatctatacacatggaaatcattcattaattgtgcctccttcaaagaaccctcaaaatcctactgacctgtatgacactgtcacagataatgtgcaccatccaagtttatttgtggcattttatgactaccaagcatacccagagtaccttattacgtttagaaaataacactttggatccttcccacaaaattattctccatttgacatatctagttgtaaaacaagttttagctttttttttaattcctcttacagattttctaatatccaaggatattctttgcgctgagcagntttttcncttnttttctaatggaaataacttttatttgaagcaaaacttggaaattacctcggcggaacncctangggaaatcaaccctgnggcgtntagggaccactnggncaactgggaa

SEQ ID NO: 376 - DNA, 397 bp, Homo sapiens
  misc_feature 326: n = A,T,C or G
cctgcgagggccgaagctaagctctcacgtctggccgccttcaggctccgcacacacaggaagcaaaagctaaggcagagttgaaaatgtgtttaaccgcggaagggctgaccccacatgcacacagacccttctacaaactctgggagggttttatgggtttttttgattccagatgtttaaggaaatctctgtcctatcactgaccactgggctaaaagaataggaagaaacggccatacgtgacaaaaaatacagactttacaaccagaaaagtcattaaacaaataactactgcaacaaacagcaagacaaacccgggaganggcgtaggatcatatttccagagttgctacattataatattctaaacacccagtttacctcggccgcaacc

SEQ ID NO: 377 - DNA, 301 bp, Homo sapiens
  misc_feature 23, 33, 35, 41, 114: n = A,T,C or G
aaacttgatccaacctctttgcntcttacaaantnaaacanctaaaataagtaaaataagaaggcaatgcttgtggaatgtacagtgcatattggcggcgcacgcctcattacnattcgcctgcttgcttctcctgttcaatcgtttctttggaaggcagtggatttttctcttgcgtctctgtcttcttcagtttcgacttatcgaatttctcgatctcagccatatcgggtttgtcagacatggttgcggaggaaaagcgaagcgaggcgcacgagtacgagcgaagtctggtctgcgc

SEQ ID NO: 378 - DNA, 734 bp, Homo sapiens
  misc_feature 359, 373, 377, 380, 389, 417, 426, 432, 435, 438, 500, 506,513, 517, 520, 528, 532, 542, 545, 558, 574, 581, 591, 603,610, 611, 620, 621, 622, 635, 645, 651, 652, 661, 667, 678,679, 685, 690, 704, 709, 720, 722, 727: n = A,T,C or G
gggcaggtccacagaagttgctgctgacgctctgggtgaagaatggaagggttatgtggtccgaatcagtggtgggaacgacaaacaaggtttccccatgaagcagggtgtcttgacccatggccgtgtccgcctgctactgagtaaggggcattcctgttacagaccaaggagaactggagaaagaaagagaaaatcagttcgtggttgcattgtggatgcaaatctgagcgttctcaacttggttattgtaaaaaaaggagagaaggatattcctggactgactgatactacagtgcctcgccgcctgggccccaaaagagctagcagaatcccaaacttttcaatctttcttaaanaagatgatggtccncccnttntgttgtaanaaaaccccttaaattaaagaaagggaanaaaacctangaccanaanccnccccaagaattcagcgtctttgtttacttcccccttgttccttgccagcacaaaaaccgggngggcgntatttgnctcnttnaaaaaaanccanccgtcccccnggnaaaaaattaacgnaaagaaggcttgccanaaatatngcttaaaacntttttgggaccntcggccnnggaaccacnnnttaagggcgaaanttccaacccnctttgnngggccgttncttaangggaatcccanncttcgngtacnccaactttggcggntaaancttggggcaananctctnttccgcg

SEQ ID NO: 379 - DNA, 441 bp, Homo sapiens
  misc_feature 117, 146, 175, 191, 194, 215, 221, 226, 264, 279, 283, 288,290, 295, 302, 314, 320, 325, 326, 339, 352, 379, 383, 401,407, 409, 419, 425, 429, 432, 437: n = A,T,C or G
aaataatggttgtataaaattgcagcagcaagaaacccaaaggagaatagctctaggggagggaggtggatgagtatgcatgggggagaggctcttttgtgaccaggttgggtctgnagccctccccactgtccataacacctccnacccctacatctttttccatataccaacnccttggagatataatncanaagtgaagtgatcaggctgangattanggcangtgtctggaatatgatcaggagtgggaggggagtgacntacctcacaggcaangcanaactncnccaangctatangtttccttcccncccctnacttnnaatcctcagggcngaccctgactccncctggcttgccccttcccctacccccnttcncccttttttttttccctncccggncngcccttccanagggcnaatnccngcccncttg

SEQ ID NO: 380 - DNA, 594 bp, Homo sapiens
  misc_feature 10, 392, 469, 519, 527, 533, 555, 568, 579, 581: n = A,T,C or G
gagcggccgngcgggcaggtaaagtaatagctatcagtaatagctgagtgttttttcccctaatattttccttgtgcaattcagacttaagcatcgagtttttaccatcttccactttaagctaagttatgatacctattccattcacaattggtgttctttttaaggtttgcaaatttcagccaattttgtagctaagattgttctgatcagctcaaaaagatttggcttagtgttttcattgcaaattataattgctgtagagccacacacaacttttgaacttttaattataagtgttatggctaaagttatttactgaaaatttcagtaaaatgtgtgaatgtttctttatgtattaacctcatagcagtaaatgactttgctgtggntaaattttctaaggcatcttaatagacttctgttgaaacttcagggtaacattttatagtttgactaaatttaccgngattaaaaatgaatttatgcatagacagaatttacctcggccgcaccacnctaaggcnattccncacactgggcggccgtactagnggatccaactcgnaccaagctggngnaatcatggcatag

SEQ ID NO: 381 - DNA, 627 bp, Homo sapiens
  misc_feature 349, 405, 410, 460, 503, 512, 514, 554, 590, 596, 614: n = A,T,C or G
gccgaggtaaaatactgtcatttgctcaaagctggctgccaaatgtttggtgatgaaggcagaaatgaatggctcaaaacttgggagaagagcaaaacctgaaggggccctccagaacaatgatgggctttatgatcctgactgcgatgagagcgggctctttaaggccaagcagtgcaacggcacctccatgtgctggtgtgtgaacactgctggggtcagaagaacagacaaggacactgaaataacctgctctgagcgagtgagaacctactggatcatcattgaactaaaacataaagcaagagaaaaaccttatgatagtaaaagtttgcggactgcacttcanaagggagatcacaccgcgttatcaactggatccaaaatttatcacgagtattttgnatganaataatgttatcactattgatctggttcaaaattcttctcaaaaactcanaatgatgtggacatacttgatgtggcttatatttttgaaaaanatgttaaangngaatccttgtttcattctaaaaaaaatgggccctaaagtnaaatgggggaaccacctgggattttggatcctgggncaaacntttaaatttattattgcngggatgaaaaaaa

SEQ ID NO: 382 - DNA, 574 bp, Homo sapiens
  misc_feature 342, 393, 410, 413, 463, 493, 495, 499, 523, 548: n = A,T,C or G
gtggagggagaatcacgacatcattcataaataactgtggagtctgggatgctggctgaaggcatctccaggaaggactggagggcgattttgctaaagggctgctcactgctcatttcactgcatgccgcttttctcactttggttgggagtttgaaggaccatgtaatcacagagattagagctccctgtgaaatcaatcactgcctttagatctccacaaagacctgttctccaatagcacatgcgtttctctgtgagctgtattcgcatcagcgccggagcctcagaaagaatgcgtgtttacactctgtactctccaatgggtaatatttatcatanaaatctaatcatattcttcatcttgaatccaacttctgtacagtagcatancggggttgcttgctganacntgaagggttacgtccttgcccatgcaggtctccaaaagagtggaaaaatncaagataaaaatggaaaggacctcggcgcnancacnctaagggcgaattccaccacttgnggccgttactagggatccaactcgnaccaaactggcgaatatggcatactg

SEQ ID NO: 383 - DNA, 719 bp, Homo sapiens
  misc_feature 343, 394, 408, 410, 423, 450, 507, 518, 567, 586, 605, 610,614, 616, 636, 638, 649, 651, 657, 659, 667, 681, 684, 694,702, 704: n = A,T,C or G
aaattatttcactgaagctgagattattagtgatacaaagttaaaatttcaatatttaatttctctatatattattaatattaaattgttttttacttataaattcatgttctcatctgatttaatattaaatttgtataggtgggcgtttcttaccattttgcacaagtttttgtttttctgaaatacttaattgtgcaggttgtaaaaaagattagtgcattttcattttaaggatgctttgctccttaaattgttcgacagaaatgactttttagggaaagtagtttttttggagctactaacttgtatttattattgtacatgcataaccaggggtggngagggcactaatcttgtaggaaacacttacttggaggttttattttgaacnttttcctatagggntnacctttacctgcntagaattaacccttaggaaccagtggncattgaaaatctgggggttgaaagggagaaataccagttttttattgaagaaacccnttaaaagttcnaaaataggaaaatcattttctggaagaacaaaaagcccgaagggaattnttggtcaagtggcccaaanaaatgggaaagaaaataanggggngggnantttaacccttggggccaagntntttggaaaaananaggccntnaaaaaacnggggaacctacctnttnattggggaanaaagtttntncttttttttaatcca

SEQ ID NO: 384 - DNA, 514 bp, Homo sapiens
  misc_feature 46, 193, 282, 313, 318, 332, 341, 353, 357, 359, 378, 386,424, 450, 452, 469, 494, 502, 506: n = A,T,C or G
tttttttatgacactggatttctttaattaaaaaaaaaatgccaanaaacattatttatacagggttgattgctttcatgttgttattctgtaccctatagtagcctccatgaaaatctggtatttcttgctgcttggaactactttgcagtgattacttggttgcagtccaagtactctcgtttagtctgancctggagatgttctaaacttgcttctcccacctctgagattaggacaggaaaaatgtgaaatttcccaattacaggattatacggcccntcacatcatttgtggaaattggggtgactgnatacngggattgggctaangactgtggncttatttttccncatncnggcaaaaaggcctatccanaaatccanttcctttggaaaggaaaaattggtcctccttgtcccanaagggggttcccaaaaaaaggggaangncccttttaccctttgcnggggggggggggaaccctgaaaggncttttcantccntttgcgta

SEQ ID NO: 385 - DNA, 444 bp, Homo sapiens
  misc_feature 166, 330, 357, 367, 374, 389, 396, 405, 406, 419, 420, 421,437: n = A,T,C or G
gccgccgcttgtgctgcagccatgtctctagtgatccctgaaaagttccagcatattttgcgagtactcaacaccaacatcgatgggcggcggaaaatagcctttgccatcactgccattaagggtgtgggccgaagatatgctcatgtggtgttgaggaaagcanacattgacctcaccaagagggcgggagaactcactgaggatgaggtggaacgtgtgatcaccattatgcagaatccacgccagtacaagatcccagactggttcttgaacagacagaaggatgtaaaggatggaaaatcaccaggtcctaccaatggtctggancttgcccgggcggccgttcaaaaggcnaattccaccnacttggngggccgttacttagnggatccnaacttcggnnccaaactttggcnnnaatcattgggcattancttgttt

SEQ ID NO: 386 - DNA, 348 bp, Homo sapiens
  misc_feature 328: n = A,T,C or G
ccaggatggtctcaatctcgacctcgtgatccgcccaccttggcctcccaaagtgttgggattacaggcgtgactcaccatgcccagccacttagttttttcttattcccacctttctatcccatagaacactcttttttatcttccctgaaccatattgatgagataaatagggctgggggctgggccccgctggtcactcaacagagtatttcccttggccgagatggaagttttgtcccaatagatgagctgctgagtatcaacaaggtgacatttttctgctgcccatttgtgtcctggagacggtggtaccctgaaggcagangccagaccttccccggcggg

SEQ ID NO: 387 - DNA, 139 bp, Homo sapiens
tcgaaatgcagaacgacgccggcgagttcgtggacctgtacgtgccgcggaaatgctccgctagcaatcgcatcatcggtgccaaggaccacgcatccatccagatgaacgtggccgaggttgacaaggtcacaggcag

SEQ ID NO: 388 - DNA, 715 bp, Homo sapiens
  misc_feature 34, 36, 43, 49, 70, 125, 128, 142, 192, 208, 235, 267, 277,301, 338, 374, 375, 387, 481, 482, 492, 505, 509, 517, 526,547, 576, 577, 580, 594, 606, 607, 611, 639, 659, 669, 673,682, 690, 691, 696: n = A,T,C or G
ggcgatgttacaaattaattttaacggcttacanantcatttnaagaantgtggtgggaaatacaatcanattttggcatttcgacctacaggatggacacactctaacaagttcactagaatancanatgttattccccanaccaaaggaaacatttcaatatatggaattccttacagtgaacacagcanctacctagaaatgaancgctttgtccagtggctgaagccccanaaaatcatacctactgtaaatgtgggcacctnggaaatctangagcacaatggagaaatattttanagagtggaaattggaaactggatattgatgatacctnccaggattcaagataagttaaattcctttggatgtnncttgttacttanttaaaatctattaaaaatgtgaaaatacacttttgtgggggaaaaccctcattgaaaaattgttcaaaatactttatttttctcatttatgttnnaaccaccatnttcctgggggttnaatncctttcanccttcatcnaaggatactgaacttgggtcncccttgggaccttaatttctttgcccctnnccntccttgggcagttnttttcttcttcnncccnttcaaaaaggaaacaaagcgcgattccngacccaacggttaatgatantaaacaaagncttnaaccttttnttttaacnnttttnggttttcctcccggcgggc

SEQ ID NO: 389 - DNA, 573 bp, Homo sapiens
  misc_feature 25, 40, 49, 72, 185, 201, 269, 315, 380, 384, 405, 412, 430,444, 473, 481, 500, 531, 538, 543, 546, 550, 556, 557, 563: n = A,T,C or G
acctgttaatataagggatttgtantatcagcttgttgancaatgactntgaatctagttttcagtgatcanaagcagcagttatttgagtgtatgaatggaatgatgatcactgtgctataatgtactgaaaccaccatattacagaaatatttactacatattttccatctgtagtttctcanaagggctatggattantttgaactgtcaaatccttgcatacttctgtgacacccctgcccattttctgtctttaattaaccaangtgttaggtgtgactgtcacaactgttatgttttccagtaaactanaagtatgatatttgataattatatttggatttcccccctaaaggaatggtgaatcctcaaaaatnaaangaaaggccttcattgaaaatnggtttgnataaattgcattgtgacncattttacctgggnagtcccttacctttttaaattttgggttnttccaaanaaccctaaataaattttgnttaaatccaaaaaaaaaaaaaaaaaaaaaanttttaanccccncgncccncccccnngggggnatcccccccc

SEQ ID NO: 390 - DNA, 350 bp, Homo sapiens
  misc_feature 13, 132, 272, 304, 328: n = A,T,C or G
ctgaggttgtcantacaatgaaaccaaactggcgggatggaagcagattattctgccatttttccaggtctttgagttgcacgtcaaatctggggctgatcaccccacacttgtttagcctgcctgtgaggntcacaacaattttcccagctctgtggtcatcaatgatttcaaattcgccaatgtaaccatgcttcatcatcacagtgagaaaccggacgatgactttggagcacggcctaataagcacctggcgtttgcctctcttttcngcattgttgatactcttgagagcatctgccangacattcatgcgcaccattgtggnggggacctcggccgcgaaccac

SEQ ID NO: 391 - DNA, 550 bp, Homo sapiens
  misc_feature 272, 342, 439, 476, 486, 503, 511, 514, 515, 534, 548: n = A,T,C or G
actaaacgagaaattgacagcccttgaacggagaatagagtacattgaagctcgggtgacaaaaggtgagacactcacctagaacagtgccgtgctgctgctgggaagttgctttacacaacacaggccacatgggaaaggccccagcagccttcagctccttcctttctccttaaagagcaacagggcttattcttgtttttcttttttcaaaagtgtggcctttgggctctgccatctggggtgtggtgtggtatgtgggaagaagtcanaggaaccgttggaaacgacgttaggcattttaccttttcagcaacattttatacatctacttgtcaatgnatttgagacattcacagccaaaagcctgggactctttgtgaaggtcctcctcacctctatctttctttctctctctctcaaactttccttaaagttntcattgcctttgccttgcttctgtgaacaagatttgnctcctccccncccttttggtgtgaaanggcggggnaannccttggcaaaaacacttcntgcccctggtcatncg

SEQ ID NO: 392 - DNA, 551 bp, Homo sapiens
  misc_feature 53, 509, 541, 551: n = A,T,C or G
agaggcaacagcattattgagaaaagcccttacagaagagtgtggccgtaggncagctattcacagtagtgaatcatcttgcagcttgccatctattctgaatgacaatagtggaataaaggaagccaaacctgctgtatggctcaacagtgttcctacaagggaacaagaagtttcaagtggctgtggagacaagagcaagaaagaaaatgtggctgcagatatcccaatcacagaaacagaagcctatcagttgctgaagaaggccacccttcaggataatacaaatcaaactgaaaacaggtttcaaaagacagatgcttctgtgtcacacttgtcaggtttgaatattggcagcggtgcattcgagacaaagacagctaacaaaattgcttcggaagctagtttttcatctagtgaaggaagtcctttgtcaaggcatgaaaacaaaaaagaaacccgggatcaatttacctgcccggcggccgctcgaaagggcgaaattcccncaccccttgcggccgtacttagtggatccganctccgtaccn

SEQ ID NO: 393 - DNA, 351 bp, Homo sapiens
  misc_feature 37, 131, 137, 155, 156, 238, 278, 287, 310, 311, 314, 327,337: n = A,T,C or G
ccaacttatatgatttttttttgtttttgtcgtgtanctatggcactgtcttatttggaacatttgcaactagggataatacaacatttttaactctcatttgacaacctactactaatcacagaccacangggtantgaccaaatttatgtggnntttgcactccatagatgcttagcccaatctttctatactcttacgattacttgggttaacgcttctgtgaggaccttctggntcttgagataccctaaatatttaagatatttagatatctngaagatagnataggatatacagattgtaccanntangaatataaggagnatgttaaaangaccagatacctgt

SEQ ID NO: 394 - DNA, 224 bp, Homo sapiens
  misc_feature 138: n = A,T,C or G
aaaatcctgattttggagacttaaaaccaggttaatggctaagaatgggtaacatgactcttgttggattgttattttttgtttgcaatggggaatttataagaagcatcaagtctctttcttaccaaagtcttgtangcggcttatagttcttttggctaacaaatcattttggaaataaagattttttactacaaaaaaaaaaaaaaaaaaaaaaaaaaaaa

SEQ ID NO: 395 - DNA, 386 bp, Homo sapiens
ccacagctaacatcattgcagcacctttactccttcggctgtgatccaatctccagctcactttttgccagcaccaacattggcctttgcagtccccctgactttcttcattctgttcttgcgttcctttcgttgctttcttgaggtctttttcttctcatacaggccatgtcttgcaagtctatgtttgggttcatttttctttgcataatccagggaatcataaatcatgccaaagccagttgtcttgccaccaccaaaatgagttctgaatccaaatacaaagatgacatccggtgtggtcttgtacattttggctagtttttcccgaatttctgccttaggcactgtcgccttcccggggtgaaggacatcaatgaccattt

SEQ ID NO: 396 - DNA, 543 bp, Homo sapiens
  misc_feature 461: n = A,T,C or G
aaaatactttatttagccaaatggtttcttgaatcttagctacagagaaatttttacattaaagaacatcatgattatcacaacaacttacttagcacttgcgtgtactaagtgctgcactaagacattgtagtttccagtgtcttgaaccaacctgggaaaaatatcagtggtgagggttcagtgtttgtatatggaggatggtgcaaactgaattattcccataaagctgcttggtaattccagagaaagcacacagccaccttctcattagaaggagggtagggataggtgttatggtgaaaaactgagatgctgctggatcccaggccagaggacctaaagaaatactctctccattaggagcccaccctgtggaggaactcgagcctactccatatggggactgggtaggaacatcagtgccatttttcttcagatgaatattgtagacccagaangaagcaccttgtaagcaggaaaaataatttgtgctgaaataatggatgtaaaatactttcttccttgccactattgtcaaaa

SEQ ID NO: 397 - DNA, 234 bp, Homo sapiens
ccagcgacctcccggttcaattcttcagtccggctggtgaaccaggcttcagcatccttccggttctgctcggccatgacctcatattggcttcgcatgtcactcaggatcttggcgagatcggtgcccggagcggaatccacctccacactgacctggcctcccacttggcccctcagcgtactgatttcctcctcatggttcttcttcaggtaggccagctcttccttcagg

SEQ ID NO: 398 - DNA, 545 bp, Homo sapiens
  misc_feature 124, 426, 509: n = A,T,C or G
ctgccctaccaaccccagggcctccagcagctccagcaagtggtacccgagcaatgccagtatctttggggggtggcccctccacagtcatggataccaagttctccccacgcagcaacaccanacccaaaacccgcttttcttcacgctctggttgcttcgcattctttggcttgatctttctgaactcatcacaatcacagaggatcaaattcatatgctagtcaaaagccttaaaggtgccaatgaagattcggccatcttgcaggatacatctcattctatagtcaatgtgctgcagcatcttgctactcttgccaacagtcatgattgctgttccaccaaatccaatgtccacagttaaaacttgatgcttctgaaacctaggggaagctatagataaaggtatgacgcaggttctcctanaaacaatgcaagctgggcagaagcttcaaaagagcaagatggagcctgggtttttgctttggaatcaaaattcctcgctactncaatatggctttaaccacctcttggggctcagctaa

SEQ ID NO: 399 - DNA, 544 bp, Homo sapiens
  misc_feature 133, 402, 419, 470, 479, 486, 498, 527: n = A,T,C or G
ctgcaaagtaccacacatagcagaaagacagaaatttatactggggggttggaagatatggctactgagtctgtaattccatttggaggttcaaaaaaccatttttacattgctattatttgtacagaccaangggacctaaattttgaaacagctagacagtgatataaacaaacatttatctctgggggtagaaaattaattataatacaagaatgaaaatgggcaaacagtatggaaggcacccacacctcctagcaccctttggttttctgatggagttctcacttcacacatcagtgcattggattgcagaaaatattgatattttatttcatcaaaagtgccatttggtatgccactattgaaagcttatcgctgctttttctccttcagcaaagnagaagtcaatgaagcanggtgtggtagttacccaaattcctataaggcactttacggttttcacctgnccgggcggncgttaanggcgaattccanacacttggcggccgtttctaggggatccnaactcgtaccaagcttg

SEQ ID NO: 400 - DNA, 561 bp, Homo sapiens
  misc_feature 15, 20, 21, 30, 35, 37, 360, 509, 519, 545: n = A,T,C or G
cagcgggcggccggncaggnntgaaagaancccancnacattatcctctccatacatttgcaattggcatggaagacagccccgatttactggctgctagaaaggtggcagatcatattggaagtgaacattatgaagtcctttttaactctgaggaaggcattcacgctctggatgaagtcatattttccttggaaacttatgacattacaacagttcgtgcttcagtaggtatgtatttaatttccaagtatattcggaagaacacagatagcgtggtgatcttctctggagaaggatcagatgaacttacgcagggttacatatattttcacaaggctccttctcctgaaaaagccnaggaggagagtgagaggcttctgagggaactctatttgtttgatgttctccgcgcagatcgaactactgctgcccatgggcttgaactgagagtcccatttctagatcatcgattttcttcctattacttgctctgccccaaaaatganaattccaaanaatgggatggaaaaacatctcctganaataacctttgaggat

SEQ ID NO: 401 - DNA, 446 bp, Homo sapiens
  misc_feature 424: n = A,T,C or G
ccaggagctaagcttgagtctcctttactgaatttcgttcttagtgcaggttacttgtagattctagtcttcacaggctccctggggctcttaactagtcacactgggagtcatgaatgtctttccaataattcagggaattctagagatcctcaaactgtaaggtctattcatactcaacacaaggaaaaaacctcattaaaattaatgactaatcaggaagcaacgtaaccaaaagcacagtgaatgaaagttttcatggtaggttcaacatgggtttattgctagaaagatccaggggatagctttaggtttaacttcggctcaccaacgtaactttctaatcatttatttcagtaatagctagaagtgggtctgaatgttttcccagagtctgataccgtgtttttttttgccagaaganaggtcttcaggagacttcattt

SEQ ID NO: 402 - DNA, 585 bp, Homo sapiens
  misc_feature 421, 445, 484, 485, 520, 530, 577, 579, 580: n = A,T,C or G
ccaaagcagccagggaagagtgccctgtgtttacaccgcccggaggagagacgctggaccaggtgaaaatgcgtggaatagacttttttgaatttctttgtcaactaatcctgaaagaagcggatcaaaaagaacagttttcccaaggatctccaagcaactgtctggaaacttctttggcagagatatttcctttaggaaaaaatcacagctctaaagttaattcagacagcggtattccaggattagcagccagtgtcttagttgtgagtcacggtgcttacatgagaagtctgtttgattattttctgactgaccttaagtgttccttaccagccactctgagcatatctgaacttatgtcagtcactcccaatacagggatgaagtctctttatcataaactttgaggaaggaaganaagttaaaaccaacgggttcaagnggtattttgtattgaaccctacagggatcatcttaaaanngggactggacttggaaaacttccctttaagggttnaaaatttggnattcaaaaaatcttaaccattttttgaaacccttttttaaaggggananngccat

SEQ ID NO: 403 - DNA, 527 bp, Homo sapiens
  misc_feature 96, 132, 137, 151, 208, 230, 363, 375, 397, 399, 473: n = A,T,C or G
ctgagcgatgaggatatcatcatgcactggtcggatagtgccctctggaaagagatcagcctggttccccagggggatccatgtcatatgcctggnatacactttgtggctcacgtacagttcgttgggggncagangaatctttagcagnatgggggttccgagtgcatctgacctggagacgaaactgtagagtatctatctctgngccttcttcatctccttgggtncgatactcaaaaagacggggatcagcatgaatgggaatgagccccagacggtgagcaagaatctcatcctgaacaatggatgtattattgtacaccaggaccttctccacagccatagttggcacctcagctncagaattcgtcnaaaagcattggcaatggctgcnanaattcccaccatgtcaaactccagtgagttttcatccatgtgtactacatccacaccggaaattcttctcgaancgggtcccttggtcccaaggcatcatcataaaccggaatagttacccgggaaaa

SEQ ID NO: 404 - DNA, 172 bp, Homo sapiens
  misc_feature 164: n = A,T,C or G
cctgatgggcgagtggtggggcagggcatgcctcagtcggagtcacaggtcttttgttcggtggcagcatccactgcagaggctaggctgtcttcctggcctttcagcctttcacggatcagctcgcaatgggccctctgagtccgcttttttagtttctccancttcttgg

SEQ ID NO: 405 - DNA, 552 bp, Homo sapiens
  misc_feature 11, 228, 273, 367, 378, 388, 389, 402, 410, 436, 466, 472,490, 492, 509, 546, 552: n = A,T,C or G
ctaggtcctgncatttcctactggatgttctctcaataattgtgctgcccattatactcccaatgccggtgacacaacagtattacagtatgatgacatctgtaaaatagactttggaacacatataagcggatgattattgactgtgcttttactgtcacttttaatcccaaatatgatacgttattaaaagctgtaaaagatgctactaacactggaataaagtgngctggaattgatgttcgctgtgtgatgttggtgaggccatccaanaagttatggagtcctatgaagttgaaatagatgggaagacatatcaagtgaaaccaatccgtaatctaaatggacattcaattgggcaatatanaatacatgctngaaaaacagnncccattgtgaaangaggggangcaaccaataatggaggaaggagaantatatgcaattgaaaacctttggtagtcangaaaangtgttgttcatgatgatntngaaatgttcaccttacntgaaaaattttgatgttggacatcgccaataaagctncaaaan

SEQ ID NO: 406 - DNA, 545 bp, Homo sapiens
  misc_feature 139, 248, 319, 337, 367, 431, 496, 528, 545: n = A,T,C or G
ccagcccctccttgttccagccggtggtgtgacttcgttggttgaggtgtgtctccaacctacatcagaccatgaagttcaacccctccagggaagctcctgatttcccctgcataattgaaaataggatatttctcanctattgaacagttactaatttatggggtggaaacagcattaagaatactgaatcaaatggaaaaacaaatgaatacaggaagataagtgttcgttcttttctgaaaaanagtatgtgtaccacaagagctggttttaattgggtgaattgtttttgtcctcattctgtacagaaatttgnatatatgatggttcttanaacttgttttaatttttgtggtccttctgnttattataataggccgccaccaatgattatccatatgtgttcttaatttttaactgctggaagngttaaaacacacacacacacacacacacatttttttgagaactccaaagccctgaaaattttggnggacaatgatttttaccttgcccgggcggtcnttaaggggaattccacn

SEQ ID NO: 407 - DNA, 421 bp, Homo sapiens
  misc_feature 244: n = A,T,C or G
aaaatggaaaaggcccctattgatacctcggatgtagaagaaaaagcagaagaaatcattgctgaagcagaacctccttcagaagttgtttctacacctgtgctatggactcctggaactgcccaaattggagagggagtagaaaactcctggggtgatcttgaagactctgagaaggaagatgatgaaggcggtggtgatcaagctatcattcttgatggtataaaaatggacactggagtanaagtctctgatattggaagccaagatgctcccataatactctcagatagtgaagaagaagaaatgatcattttggaaccagacaagaatccaaagaaaataagaacacagaccaccagtgcaaaacaagaaaaagcaccaagtaaaaagccagtgaaaagaagaaaaaagaagagag

SEQ ID NO: 408 - DNA, 556 bp, Homo sapiens
  misc_feature 536: n = A,T,C or G
aaagagatttattaaatcatcttatcacaaagatggaaacatatacaaactagaaacatgcaaccatcatcttccacagtcaagtcacaatgtcaaatatttttcttgcctctgcagatgaaaagttcagatcttatacccaactacttactcaccccgaatatttaagtcagtcttcctgaaagtactcagggtagcaagtaacaaaatgcaaacgattatataaagaaagtgcagttaaaaaggaaactatgtggcaagtaccctctttcccttcccaccccccaattaaaggcaaacaatggcactttgctcttgcttaacctagattgtcttcaaaaactattaaaatgtaaaagacttaacaaaaaaacaaaaagacgtttaacagatgtcaaaaagctccttagtgtttgaaaataaatgcttaaacaaaagacaacatattttatatcaaacaagtttgaagagccctgaattgcagcattctgtaacataaacaaacaaaaagctggtatagggatttattgtcaaangcagaatttcttcaggcagg

SEQ ID NO: 409 - DNA, 522 bp, Homo sapiens
ccatcaaccacaaattggaaatcaagtacatagattctgcggacttggagcccatcacctcgcaagaagagcccgtgcgctaccacgaagcttggcagaagctctgtagtgctcatggagtgctggttccaggaggatttggtgttcgaggaacagaaggaaaaatccaagcaattgcctgggctcggaatcagaaaaagccttttttgggcgtgtgcttagggatgcagttggcagtggttgaattctcaagaaacgtgctgggatggcaagatgccaattctacagagtttgaccctacgaccagtcatcccgtggtcgtagacatgccagaacacaacccagggcagatgggcggaaccatgaggctgggcaagaggagaaccctgttccagaccaagaactcagtcatgaggaaactctatggagacgcagactacttggaagagaggcaccgccaccgatttgaggtgaatccagtctggaaaaagtgtttggaaaacaaggcttgaagtttgttgg

SEQ ID NO: 410 - DNA, 527 bp, Homo sapiens
  misc_feature 490: n = A,T,C or G
ccaaaggaatctgcagcaacttcttaaaatactgttaacatctttgggtttgctgaggcttgtcagtaacttacatcaaatcctcccaaaagaagatctgattagatagatatgactaaacggttttgtagtaataatccaattttacacattaatttgctgttgcaaatctgcccaaagctacaggtaatgaaaaataaagcaagtgtaaaatggatagtctgacacttaaaaatttatacaaagtggaagttaaagtttacatatttgaaaatcacatatacactaaattaccattatctgaattttccaaagacaaattgcaccatgacagctacaaaaggcatagggtttggttttaagggcacaagaagggagggcagaggagaggaaggggacaacagataaattaacaaagtaagaccaacttggtaaggtcaatctgagacatgctgacacaaatgaaacagctttcatctttgagtcatangaaaaagacaatcattttgtatttgcgcataaaagtt

SEQ ID NO: 411 - DNA, 549 bp, Homo sapiens
aaaaaaagaagcaagttctgaagttcactcttgattgcacccaccctgtagaagatggaatcatggatgctgccaattttgagcagtttttgcaagaaaggatcaaagtgaacggaaaagctgggaaccttggtggaggggtggtgaccatcgaaaggagcaagagcaagatcaccgtgacatccgaggtgcctttctccaaaaggtatttgaaatatctcaccaaaaaatatttgaagaagaataatctacgtgactggttgcgcgtagttgctaacagcaaagagagttacgaattacgttacttccagattaaccaggacgaagaagaggaggaagacgaggattaaatttcatttatctggaaaattttgtatgagttcttgaataaaacttgggaaccaaaatggtggtttatccttgtatctctgcagtgtggattgaacagaaaattggaaatcatagtcaaagggcttcccttggttcccactcatttatttgtaacttgacttctttttttttcttgcttaaaaatttcaattctcgggg

SEQ ID NO: 412 - DNA, 550 bp, Homo sapiens
aaagagatttattaaatcatcttatcacaaagatggaaacatatacaaactagaaacatgcaaccatcatcttccacagtcaagtcacaatgtcaaatatttttcttgcctctgcagatgaaaagttcagatcttatacccaactacttactcaccccgaatatttaagtcagtcttcctgaaagtactcagggtagcaagtaacaaaatgcaaacgattatataaagaaagtgcagttaaaagggaaactatgtggcaagtaccctctttcccttcccaccccccaattaaaggcaaacaatggcactttgctcttgcttaacctagattgtcttcaaaaactattaaaatgtaaaagacttaacaaaaaaacaaaaagacgtttaacagatgtcaaaaagctccttagtgtttgaaaataaatgcttaaacaaaagacaacatattttatatcaaacaagtttgaagagtcctgaattgcagcattctgtaacataaacaaacaaaaagctggtataggatttattgtcaaaggcagaatttcttcag

SEQ ID NO: 413 - DNA, 322 bp, Homo sapiens
  misc_feature 16, 34: n = A,T,C or G
ctgatcaagactgganacaaagtgggagccagcnaagccacgctgctgaacatgctcaacatctcccccttctcctttgggctggtcatccagcaggtgttcgacaatggcagcatctacaaccctgaagtgcttgatatcacagaggaaactctgcattctcgcttcctggagggtgtccgcaatgttgccagtgtctgtctgcagattggctacccaactgttgcatcagtaccccattctatcatcaacgggtacaaacgagtcctggccttgtctgtggagacggattacaccttcccacttgctgaaaaggtcaagg

SEQ ID NO: 414 - DNA, 544 bp, Homo sapiens
  misc_feature 544: n = A,T,C or G
cctggcttcttcgggatgctccagaacaaaggactaacagactactgctttgactataaccctcccgatgaaaaccagattgtgggacaccaggtcattctgtacctctgtcatgggatgggccagaatcagtttttcgagtacacgtcccagaaagaaatacgctataacacccaccagcctgagggctgcattgctgtggaagcaggaatggatacccttaccatgcatctctgcgaagaaactgccccagagaatcagaagttcatcttgcaggaggatggatctttatttcacgaacagtccaagaaatgtgtccaggctgcgaggaaggagtcgagtgacagtttcgttccactcttacgagactgcaccaactcggatcatcagaaatggttcttcaaagagcgcatgttatgaagcctcgtgtatcaaggagcccatcgaaggagactgtggagccaggactctgcccaacaaagacttagctaagcagtgaccagaacccaccaaaaactaggcttgcattgctttgaagagcaan

SEQ ID NO: 415 - DNA, 546 bp, Homo sapiens
  misc_feature 489, 515: n = A,T,C or G
ccacgtccatcggagtgtccttctcggtgggcgacggggtgcctgaggctgagaagaacgcaggggagcccgagaacacctatattctgcggcctgttttccagcagaggttcaggccctctgtggttaaaagactgtatccatgctgtgctcaaggaggaactggcaaatgctgaatattctccagaagaaatgcctcagcttacaaaacatttatcagaaaacattaaagataaattaaaagaaatgggatttgaccgatacaaaatggtggtgcaagtagtgattggagaacaaagaggtgaaggagtattcatggcttctcgctgtttctgggatgctgacactgacaactatactcatgatgttttcatgaatgacagtttattctgcgttgtagcagcatttggctgtttctactactgaatgaatctttgaaaagctggtaaaagacatgaccatgaagaaatctgaactttttaatattgntaaatatcttgacaaaataaagatgntagtagttcgaaaaaaaaaaaaaaaaaaaat

SEQ ID NO: 416 - DNA, 546 bp, Homo sapiens
  misc_feature 102, 107, 122, 150, 161, 172, 226, 248, 269, 282: n = A,T,C or G
ccgggacctcatcagccacgatgagatgttctccgacatctacaagatccgggagatcgcggacgggttgtgcctggaggtggaggggaagatggtcagtangacanaaggtaacattgatnactcgctcattggtggaaatgcctccgntgaaggccccnagggcgaaggnaccgaaagcacagtaatcactggtgtcgatattgtcatgaaccatcacctgcangaaacaagtttcacaaaagaancctacaagaagtacatcaaanattgcatgaaatnaatcaaagggaaacttgaagaacagagaccagaaagagtaaaaccttttatgacaggggctgcagaacaaatcaagcacatccttgctaatttcaaaaactaccagttctttattggtgaaaacatgaatccagatggcatggttgctctattggactaccgtgaggatggtgtgaccccatatatgattttctttaaggatggtttagaaatgggaaaaatgttaacaaatgtggcaattattttggatctatcacctgtcat

SEQ ID NO: 417 - DNA, 375 bp, Homo sapiens; identical to SEQ ID NO: 143

SEQ ID NO: 418 - DNA, 512 bp, Homo sapiens
aaagtatatggaagatgtgcaaaggttatatgcaaatactgtaatattttatataaatgacttgagcacctgcagattttggtatccctgagagttcctggaaccaatccccttcagataccaaggaatgactgtacatgtttggtagaaaactagttgtctctacctagtctccattctggtcacttctttagtttcctaatttcagagtaaggccagtctccttctgtgatggttaattttgtgtcaacttgagtgaaccaagggatgcccagatacctggtaaaacattatttccacgtgtgttggtgggggtgtttctggaagtcattgacatttctactggtagactgagtacagaagatccaccctcaataatgtggatgggcatcagtccattcagtgccccatatgaaacaaaaaggcagaggaaggacaaaatcagcctctctgcttgttctgggacatctattttctcctgctcttggatatcagtacacttgcttctctgg

SEQ ID NO: 419 - DNA, 539 bp, Homo sapiens
  misc_feature 538: n = A,T,C or G
aaaaaagcacctccttaccccatatcacgtttctctgacaggtgttaaagtaggcaatgagtatgtcaacagcttgagcatcagcgtcttgcaaggacttcagaccaaccactcgccaaaaatcttggcagctttttatcttgtttttaatacaacggtatatccactctgatggcaaacctatccagccacatctccacaacaagctttgcaaaatcagtgattagcaaattagttagctttggcacggagctgtgctcgcttgcccgtgacagcctggaagccggttttgatactggcaacagaacatctagaatgacaagtttcgcactgtaggaaatagagtcgtgtgtccttctgcaggattgtgtccggtgatcggcatgtgtgacaagtgacatattccttgatatatcttctcaagacattttctatctgtttctgttggaatcttcctttgattacaagttggttattaccatctatagaaccacttgtacccaattcagccaacaaaaatgcaaggagatgttttggng

SEQ ID NO: 420 - DNA, 538 bp, Homo sapiens
  misc_feature 14, 130, 137, 403, 412, 413, 418, 443, 455, 473, 481, 487,490, 527, 536, 537, 538: n = A,T,C or G
ccagcagtacccanagaaaatgggcagcagcaggtaaaccagccaggaggtggagtcctctgaacccacagcagaccccaccctcctgcccagcccctgcccacattgggggtcaggaccactgaaactntggtcangacagtgggtgctctcagcagtgtggcaagctcagagcagagctcccaaggaccataccacactggttcaaaacccataggtgacaccatcccagcagaagcttccatgggtgctggatcccagggctgcatcctgagcacaggtgggcagactggaacataacactaggacccaagggatccagaacattttaggcccatctcctgggctgctccagcctgttgccatgacttgggcaagtgagtgggcctccttgccaggtggnagggcacanntttanaccaaaccctttggcctcccccttntgcagttacctntgaccaaaaaggaactancaagcctntgtggnaanaccataggggggggtgctgggaatccttggggccggntggcccccnnn

SEQ ID NO: 421 - DNA, 295 bp, Homo sapiens
cctgggctcgcctggaccacaagtttgacctgatgtatgccaagcgtgcctttgttcactggtacgtgggtgaggggatggaggaaggcgagttttcagaggcccgtgaggacatggctgcccttgagaaggattatgaggaggttggagcagatagtgctgacggagaggatgagggtgaagagtattaacctgtgtgctgtacttttacactcctttgtcttggaactgtcttatttttgttctgtaaatgtctattgccgtaaattgttaataaaattgatgtttccatttt

SEQ ID NO: 422 - DNA, 422 bp, Homo sapiens; identical to SEQ ID NO: 5

SEQ ID NO: 423 - DNA, 446 bp, Homo sapiens
aaggtgctccttgccgccgccctcatcgcggggtccgtcttcttcctgctgctgccgggaccttctgcggccgatgagaagaagaaggggcccaaagtcaccgtcaaggtgtattttgacctacgaattggagatgaagatgtaggccgggtgatctttggtctcttcggaaagactgttccaaaaacagtggataattttgtggccttagctacaggagagaaaggatttggctacaaaaacagcaaattccatcgtgtaatcaaggacttcatgatccagggcggagacttcaccaggggagatggcacaggaggaaagagcatctacggtgagcgcttccccgatgagaactttgccaaacaccacatgcttgccatctagccaggctgtcttgactgtcgtgatgaagaactgggagccgttggtgtctttgcctgcgttgg

SEQ ID NO: 424 - DNA, 531 bp, Homo sapiens
  misc_feature 450, 531: n = A,T,C or G
aaaaactgactaggtcaaaaatagttacgcctgcaggttgacctattcagactttgccaaactcctccaagttcaatataaattgacgttttcagagtacaaagtcaattttacggaaacgctgttcctccttttccatggagccaatctgggtaattttttcattaaaattcttcttctgcctgtttgctgcggaactctttgagctgctgtagccgctcgatagtttcagaaatggtgcgttccccgtggaccttattgtctcttgtgcggatattaacagtgccactgattttctctttttcaccaacaactaaaatgaagttatactgtgctaactgtgcatttcgaatctttttattcaatgtacagcctggatccagatcaatgtctgccatgaatttggcatcgtggaattgttgtcgtaccttttgggcatattcatcacangttggtcccactggaactaccattacctggcgaggggacagccaaaagggccttttgccccatagtttctgtgaggatagn

SEQ ID NO: 425 - DNA, 406 bp, Homo sapiens
ccttgagagcccagcccttgcatcagtgtagcctggacgtgaggcatggagtcaaaagagattattttggagctttaagattcaatggctgccctgctgggttttgaacttgcacgtggcctgtagccctctttgttttgcctgatttctctcttttggaatgggagtgtttagccaatgcctgtgcccctattgtatcttggaagtaactaacttgtttttttattttatagactcatgggcagaagggacttgccttgtctcagatgagactttggactgtggacttttgagttaacactgaaatgagttaaaatttaggggactgttgagaagagattattgtattttgtagtgtgagaaggacatgatatttgggaggggttggggtggaattatatggttt

SEQ ID NO: 426 - DNA, 322 bp, Homo sapiens
ctgatcaagactggagacaaagtgggagccagcgaagccacgctgctgaacatgctcaacatctcccccttctcctttgggctggtcatccagcaggtgttcgacaatggcagcatctacaaccctgaagtgcttgatatcacagaggaaactctgcattctcgcttcctggagggtgtccgcaatgttgccagtgtctgtctgcagattggctacccaactgttgcatcagtaccccattctatcatcaacgggtacaaacgagtcctggccttgtctgtggagacggattacaccttcccacttgctgaaaaggtcaagg

SEQ ID NO: 427 - DNA, 418 bp, Homo sapiens
  misc_feature 301, 305, 323, 328, 333, 339, 375, 381, 385, 391, 392, 397,407, 412: n = A,T,C or G
cctgttctgggagatggtcatattcacctgccaaaatctgctggaatcctttgatggtctccttcaggggtaccagcttccccatatgacctgtgaagacctcagcaacctggaatggctgagacaagaaacgctgtattttccgtgcacgggacacggtcaacttgtcttcctcagaaagttcatccatacccaggatggcaatgatatcctggagggatttgtagtcctgcaggatcttttgcaccccacgggcaacatcgtaatgctcactgccaacaatgttgggatccatgatacnagangtggaagtctaaaagatncacanacctnggccgngaacacccttaagggcgaaattccacaccacttggngggccngttncctaannggaancccaaacttngggancccaaa

SEQ ID NO: 428 - DNA, 386 bp, Homo sapiens
  misc_feature 381: n = A,T,C or G
aaatctagatagaaacacctgtgattgaattagtgcatggtaatgcatggcatatacattgcttaaggtggtaataaggggtcagatgctctacagcaaccttcaagcacaggcaccgatttgcattttatgcaaaacttcaggttttactcaatttttacactggtggaagctgatgtcagtaacttaaaaggcaagcaaatacttttccaattcttagctgaacaaaaaatacacacaatgtagcgtttttattgggcaagacttgctttttatatttcacgtgagaatgcaatataacccttccttgaacaaaatgaccagggtactaataaaaccatctttgcaggaatggttaataagcatattttatttaccttnggccg

SEQ ID NO: 429 - DNA, 452 bp, Homo sapiens
  misc_feature 356, 370, 386, 388: n = A,T,C or G
ctgattcagatcagagggaaagaaataccaaccctgcaataagtgtactaaactctacgctctggttaatgtaatgtactctcctggactgaatgcagtgtataatttctgtctacagctagaagctgtgccccagttccacatttgattacacatgtgagatttgctgctgttgcagtataaacactaggtataataggatttgaaattgcattacagttcataaaaattgaaaatgagaaattaaacctgcaagtgaaacatttgaaacgattatactttctacataagacatggttgggacatcagatacttacaaagatggtttaaagtatggatactagaaaaaattaagntctctttctctttnggttaatggattgggntnaatttccattatgctatttgcataatcaaggcactgtaaatcttataattttacctgcccggcg

SEQ ID NO: 430 - DNA, 560 bp, Homo sapiens
  misc_feature 393, 403, 478, 505, 537, 539, 553: n = A,T,C or G
aaaggtgataggtgacttaataattttccactttcaaaatgggtttctagacactgttgttcatgaaccaaaaacaaacaaacaaacaaacaacaacaaaacccaaacactttggcaagcaaagtattattagtacatagcagcttcataacagtttacttttttaatataaagatttttcaatttacacttgtaggagtagaaaaaactaatatgctaagtctgtaagctacgcagcaaaaataatgatcttaatgaagccagaattctgtgaaaatgtgcaccacactgcatatatagtagctgagtaaatgtaaaccatgtgcttattaactcttctatataaaatattgaacccccaagtctccacattgccttctatgtcccattacnttttcttganacagcctcatgcttaagccaatatatattgctatttgaaaaagttctcatcctcattctaaaatgtttctgtaangacctgccgggcggccgtcaaagggcnaatccacaactggcggcgtctatggaccactngnccacttggcgaatntggcata

SEQ ID NO: 431 - DNA, 429 bp, Homo sapiens
  misc_feature 394: n = A,T,C or G
aaaatgttcatgtagaaaattaatgaactataggaatagctctaggagaacaaatgtgctttctgtaaaaaggcagaccagggatgtaatgtttttaatgtttcagaagcctaactttttacacagtggttacatttcacatttcactaatgttgatatttggctgatggttgagcagtttctgaaatacacatttagtgtatggaaatacaagacagctaaagggctgtttggttagcatctcatcttgcattctgatcaattggcaagaaagggagatttcaaaattatatttcttgatggtatcttttcaattaatgtatctgtaaaagtttctttgtaaatactatgtgttctgggggggcttaaaaattccaaacaaatgatccctgcntttcctgaagatgtttacctcgggccgcaccacgc

SEQ ID NO: 432 - DNA, 599 bp, Homo sapiens
  misc_feature 430, 444, 466, 500, 506, 515, 524, 537, 545, 564, 572: n = A,T,C or G
ccaatactcccatttggttttactggcggcatttgattgtattgatgatactaagcttgtgaagcagataatcatatcagaaattatcagttcattgcctagcatagtaaatgacaaatatggaaggaaggtcctattgtacttactaagccccagagatcctgcacatacagtacgagaaatcattgaagttctgcaaaaaggagatggaaatgcacacagtaagaaagatacagaggtccgcagacgggagctcctagaatccatttctccagctttgttaagctacctgcaagaacacgcccaagaagtggtgctagataagtctgcgtgtgtgttggtgtctgacattctgggatctgccactggagacgttcagcctaccatgaatgccatcgccagcttggcagcaacaggactgcatcctggngggcaaggacgganaactttcacattgcagaacatnctgcagggacatctagttcttgaagtggttaatngagtangaataaaangatgaaagnaaaatgggagaanaaggttgntttgcaaaaacacttgtanaacatgtnggtatgaaaaacctgaaatcctggctt

SEQ ID NO: 433 - DNA, 227 bp, Homo sapiens
atagtctgcgcagcgtatgcacacgaactgccaaaatatggtgtgaaggttggcctgacaaattatgctgcagcatattgtactggcctgctgctggcccgcaggcttctcaataggtttggcatggacaagatctatgaaggccaagtggaggtgactggtgatgaatacaatgtggaaagcattgatggtcagccaggtgccttcacctgctatttggatgcagg

SEQ ID NO: 434 - DNA, 613 bp, Homo sapiens
  misc_feature 417, 434, 484, 504, 522, 538, 540, 543, 557, 574, 580, 593,601, 602, 611: n = A,T,C or G
aaaaaatcatacggacaaacaactttcaaacaaaactggattagtaggatttcttgcctgcttaactaacatgacagacttcttgtcccaagcccttctcagaaaaacctcatgtggaaaccaagctagagataagaattcttccctgatgcagttaggggaaagggaaaggctagaaacttctttggcaagcaattccacacacagccatttatgtgtgagtgctctgcttcaagcacagtacactctttgcagggacggccagatgttcagagtgggagtggtacttttcaaccagctaaaagtgcagaagtcatctagtcgtctgcctcttcccactgccagtgcctgcagcctttgcagcaacttttaacccccctatggactggaatattgagtttaaaagccaaggctganctggctgacgcttgtantctccattgaaaaaggaaatggatgggatggaaccgagaaaccaccagtnccttgatgaaccttcaaaanacttagggggggaaaganaaaggaaggatttcananatnggggacagaatggngggaaaatgttgggctnactggnaaggaaatggggnttccctgnntaatatgtnca

SEQ ID NO: 435 - DNA, 322 bp, Homo sapiens
ctgacccccctttgtccacagctaagatggcagcagaatgctatgtcactatatacagaaacaagacaacctgaagctaaatggatgccccctgcagagtcaacaggtccagcctcacagtgcacgccctgagctacagcctctcccaaaaggcatcttccccacagcctcaacgccgagcaaggagcatcaagggtttgtctcggttgttttgttctttttacaaactatagatatatacagttgaaaactcaggatttctagccaataaccatagttaccaccaccttacaaataaaaagaaaatgccagaaacatcttt

SEQ ID NO: 436 - DNA, 267 bp, Homo sapiens
ccaccctggagcgctatgtagagacgcaggccaaggaaaatgcctatgatctggaagccaacctggctgtcctgaagctgtaccagttcaacccagccttctttcagaccacggtcaccgcccagatcctgctgaaggccctcaccaacttgccgcacacagacttcaccctgtgcaagtgcatgatcgaccaggcacatcaagaagaacggccaatccgacagattttgtacctcggggacctgctggagacctgccatttccagg

SEQ ID NO: 437 - DNA, 625 bp, Homo sapiens
  misc_feature 403, 415, 421, 448, 452, 463, 468, 476, 486, 500, 513, 521,528, 535, 536, 545, 572, 576, 597, 599, 613, 622: n = A,T,C or G
cctgagaccctcaacagtgctgtgtgtacagaaggcccccagaatccacacaaaggggccgcctgaaacctagagcatttgtgaaggaggaaaatggaaggaacaactggatgttgtaaatgtttctcatctggccttaaaatccatgaaagctggaaaatcacaaggcatctgtgcatatactggtggattttaatgagagtcctgtgtttggagcaccagaaataaaccagcttcagaagcaaagttaacaggaggaggaagcagagctagagatggaaggagacccagccagcccgggctccagtgacatcggctggtacacgcttttgtttgcttacgcttgttgaacttgagttttttattttgtaactaacgaatactggcacatgatctgaacctnttttgacacttntttttnaagcttgacccagtggaagaaccttangaanggagaaactcncccantcttgccngggtcacaanaatgatcattcttnaaaaattttcctnggggagtnaatgggnaaatttnncttgggctntttttcccgattgaagaaggaaccttnaagnaagggtttggggaccccgaantnccggaacacccccntaccttatnttt

SEQ ID NO: 438 - DNA, 431 bp, Homo sapiens
  misc_feature 421: n = A,T,C or G
ggtgttaatactttcaaagttcttacaagggataaacgtcttgtacccggaggtggagcaacagaaattgaattagccaaacagatcacatcatatggagagacatgtcctggacttgaacagtatgctattaagaagtttgctgaggcatttgaagctattccccgcgcactggcagaaaactctggagttaaggccaatgaagtaatctctaaactttatgcagtacatcaagaaggaaataaaaacgttggattagatattgaggctgaagtccctgctgtaaaggacatgctggaagctggtattctagatacttacctgggaaaatattgggctatcaaactcctactaatgctgcagtcactgtacttaaaagtggatcaaaatcatcatggcaaaaaccagaacttgcccggcnggccgttcaa

SEQ ID NO: 439 - DNA, 573 bp, Homo sapiens
  misc_feature 406, 427, 460, 462, 497, 499, 504, 513, 518, 527, 552, 553,563, 572: n = A,T,C or G
ccaagtcaaaattgggcccagcgtctttctttctgtcttatgacagaccagcctccagccttggtgtggtatctacatgtagccctgcgtaccctgcttctttttagcattcaaggcccactcagggcctcaaattagccaatggtgaatatggatataggacttttagagggatgcaggttgagttgtacataacttagaggtgaagtgcaggtccgaaacagggctagactttggagaactgtaaaatggctcactgagcatgacagcatcaggacccctggagtggctttcaaacttaccttcttctgcaggctacttctggaaatccctaggacttaccagctttctgaacactgcgcatcatgggaaggtgaaaaagaaaaagggctagttaaaatcttgnttttctggggggccaacttangaggagcctaaagctaacccttgggcttgacantntacttttaccttactacactgtgcaatgaatgccnangccanataaacctnggccnaacacctangggaatcaaccctggggccgtctanngaccacttgnccaaattgng

SEQ ID NO: 440 - DNA, 303 bp, Homo sapiens
cggaaaatggtgaagaaaattgaaatcagccagcacgccaagtacacttgctctttctgtggcaaaaccaagatgaagagacgagctgtggggatctggcactgtggttcctgcatgaagacagtggctggcggtgcctggacgtacaataccacttccgctgtcacggtaaagtccgccatcagaagactgaaggagttgaaagaccagtagacgctcctctactctttgagacatcactggcctataataaatgggttaatttatgtaacaaaaagaaaaaaaaaaaaaaaaaaaaaaaaa

SEQ ID NO: 441 - DNA, 525 bp, Homo sapiens
  misc_feature 97, 240, 273, 284, 359, 367, 384, 417, 424, 427, 436, 440,441, 448, 451, 464, 476, 481, 487, 488, 509: n = A,T,C or G
ccaacttatatgattttttttttgtttttgtcgtgtagttatggcactgtcttatttggaacatttgcagctagggataatacaacatttttaactntcatttgacaacctactactaatcacagaccacaagggtaatgaccaaatttatgtggtttttgcactccatagttgtcttagcccaatctttctatactcttacgattacttgggttaacgcttctgtgaggaccttctggntcttgagataccctaaatatttaagatatttanatatcttgaanatagtataggatatagagattgtaccaaataggaatataaggagtattgttaaaatgaccagatcccgtttgatngttttacntgacctaaccaaatgtntggaaaaaggaaatcaaaaccttggatttttcnggggttnatncctgggtgncaannccgaaanggntcccgaaaaggcnttcccttggttnaaacngggaanntgaaacaaaaaactttgggtntttagaatcacttttt

SEQ ID NO: 442 - DNA, 83 bp, Homo sapiens
ggagtttgcagtgagccgagatcgcgccactgcactccagcctgggcgacagagacggagagactccgtctcaaaaaaaaaaa

SEQ ID NO: 443 - DNA, 618 bp, Homo sapiens
  misc_feature 366, 382, 407, 433, 439, 477, 480, 485, 491, 502, 503, 509,527, 539, 603, 607, 617: n = A,T,C or G
ctggaggccctgctgagctccctgcccccaccccaaagccagaaggaggcccaagttgcagcccgggtttggagggagtttgagatgaagcgaatggatcctggcttcctggacaagcaggctcgctgccactacctgaagggtaaactgaggcatctcaagactcagatccagaaattcgatgaccaaggagacagcgagggctccgtgtacttctaagtgcccctgcagatgggcagagggatgcatggggatgcaggtcccttgcatttcttggtatctctcagcttttcctcttgcagctccccctaccaggggtcgctttctcctggattgcaaatgccttttcagtttggactcagcttntgacacccctcttcangaaggcctaccacctttagaagtcnacctgtgggcaatgtgggtaccctgncaagcncaaaaaaaagtataactgggagtgcccagggttaaaanaanaaatnccaccngaacttggtcnnaatgangcaccttaaaaattgttnccccgaaaattngggcatggattccgtggaaggaacaacccttaaacccaaaaagggcaaactggccgggggggcntttnaaagggcgant

SEQ ID NO: 444 - DNA, 454 bp, Homo sapiens
  misc_feature 362, 364, 379, 388, 408, 412, 415, 423, 428, 429, 445, 446,447: n = A,T,C or G
ccactttctttcccacctgggaaggcggcatctatgacttcattggggagttcatgaaggccagcgtggatgtggcagacctgataggtctaaaccttgtcatgtcccggaatgccggcaagggagagtacaagatcatggttgctgccctgggctgggccactgctgagcttattatgtcccgctgcattcccctatgggtcggagcccggggcattgagtttgactggaagtacatccagatgagcatagactccaacatcagtctggtccattacatcgtcgcgtctgctcaggtctggatgataacacgctatgatctgtaccacaccttccggccagacctgccgggcgggccgttnanggccaaattcaacanactggcggncggttactagtggaacccancttnggnacccaacnttggnntaatcattggtcatannntgtttcc

SEQ ID NO: 445 - DNA, 345 bp, Homo sapiens
aaatgacgaaactcagcggaaatatattcagggattgaagaggttaatgaccatttgccagaaacactttcctacagacccatccaaatgtgtggagtacaatgcactgtgagatctgtgtatggtgtgttaataacaataagaaacttagggaagcaggctgtggacttctggaattaccaacaggaatgaggaaagaagaaaactggagtttccagtctctgagttctacccgatgtaactcttgattggttttaagaactttgttggccttcatttcatatctgactgcaagctgatttttctttcttgctttcattttaattaagtccaaaattaaatttt

SEQ ID NO: 446 - DNA, 451 bp, Homo sapiens
  misc_feature 358, 366, 372, 391, 401, 421, 434, 436, 438, 444: n = A,T,C or G
gcatttacgcattcctccagtcttaataatcacatgcggacccacagcgccaaaaaaccattcacgtgtatggaatgtggcaaagcttttaagtttcccacgtgtgttaaccttcacatgcggatccacactggagaaaaaccctacaaatgtaaacagtgtgggaaatccttcagttactccaattcgtttcagttacatgaacgaactcacactggagagaaaccctatgaatgtaaggagtgcgggaaagccttcagttcttccagttcctttcgaaatcatgaaagaaggcatgcggatgagagactgtcagcataaggaatgtgggaaaacctaaaggtgtcccttgttctcntctggaangacatnaaaacttaccttggggganaaaacccttntgaaatgtaaaaatggtggnaagcaactttgtntntnaaggtnttaaatg

SEQ ID NO: 447 - DNA, 592 bp, Homo sapiens
  misc_feature 332, 399, 440, 452, 460, 477, 486, 492, 505, 515, 516, 546,550, 559, 564, 571, 582: n = A,T,C or G
aaaaatatatggtcaggaggagactttacagtttctctttacaaacggtatataatgggagaaatggccttgtggcagaggacagtcccagacagcagccttgccacagctcaagtagacacagtccttactaagtctccacgaagagcagtagctggggagggcttctgatgctcttatttacaatcccacaatcactgctctccttcaagtctagcagtcccactgtatattgcaacttgatcgtactaaagaccgacagcaaaggatacagccagtctcgcctctgtgaagtgttgcagagaacctggagagtgctaatgaaaagctgntttaccaaaaaagttgccacgggcaacctcatatactttaggcttatgtttagaaaagagcaagggntgctacttggtagacacttggaaattccaaagtgtttttgngaataaaaatgntgtttatngtaacttaagggaaaantcgtaattnggacancaaacatggtggnttttcatgtnnatgaagttagacaagctgactccctcctanaaanctacctttnggccntttttgngccaaatcccntgaagcccac

SEQ ID NO: 448 - DNA, 470 bp, Homo sapiens
  misc_feature 335, 346, 379, 400, 403, 404, 415, 423, 429, 448, 455, 463: n = A,T,C or G
aaaggtatttgctcattggtctggcttagagacaggaagacatatgagcaataaaaaaaagattcttttgcatttaccaatttagtaaaaatttattaaaactgaataaagtgctgttcttaagtgcttgaaagacgtaaaccaaagtgcactttatctcatttatcttatggtggaaacacaggaacaaattctctaagagactgtgtttctttagttgagaagaaacttcattgagtagctgtgatatgttcgatactaaggaaaaactaaacagatcacctttgacatgcgttgtagagtgggaataagagagggctttttattttttcgtncataccgagtnttgattgaagatgattcctaaaatgctaaatgnaaatatatttgcttcccaaanggnntttatttctgnctttgggngatgcnaccaaaaaccccgaaagtnggaatgnaagtgatnccttttc

SEQ ID NO: 449 - DNA, 434 bp, Homo sapiens
  misc_feature 390: n = A,T,C or G
aaaaaaagaagcaagttctgaagttcactcttgattgcacccaccctgtagaagatggaatcatggatgctgccaattttgagcagtttttgcaagaaaggatcaaagtgaacggaaaagctgggaaccttggtggaggggtggtgaccatcgaaaggagcaagagcaagatcaccgtgacatccgaggtgcctttctccaaaaggtatttgaaatatctcaccaaaaaatatttgaagaagaataatctacgtgactggttgcgcgtagttgctaacagcaaagagagttaccgaattacgttacttccagattaaccaggacgaagaagaggaggaaagacgaggattaaatttcattttatcttggaaaatttttgtatggagttcnttggaataaaacttgggaacccaaaatgggtgggtttatccctt

SEQ ID NO: 450 - DNA, 548 bp, Homo sapiens
  misc_feature 506, 513, 518, 521, 526, 535: n = A,T,C or G
ccacagctaacatcattgcagcacctttactccttcggctgtgatccaatctccagctcacttctttttgccagcaccaacattggcctttgcagtccccctgactttcttcattctgttcttgcgttcctttcgttgctttcttgaggtctttttcttctcatacaggccatgtcttgcaagtctatgtttgggttcatttttctttgcataatccagggaatcataaatcatgccaaagccagttgtcttgccaccaccaaaatgagttctgaatccaaatacaaagatgacatccggtgtggtcttgtacattttggctagtttttcccgaatttctgtcttaggcactgtcgcttcccggggtgaaggacatcaatgaccatttgtttcctctgaagtagtcggttggtcatgaactttctagtgcggatagttaccggggtcgacctcggccgcgaacacgctaagggcgaattccaacacactggcgggccgttactagnggatccnacttnggnccaanttggcgaanaatggcataatgg

SEQ ID NO: 451 - DNA, 426 bp, Homo sapiens
  misc_feature 392, 397, 402, 406, 413: n = A,T,C or G
aaacttgtgataggcatatctatgaaacctttgtaaatttagtttattgctttaccattattttactaggtaaaattagagaacagattttgttctctaatttttaagccttatttacatatgcagaaacagcttaaatattttgactagattagacaaacagttaatagatccaccattaggaatcaatatattatgtcataataaacatcctttttctttcactgaaatttcttttagaaataaacttatttttgcttgttatgttttgaaacttgacataggatattttccctctggctacacattcacctacccttgttctctatttagattattcaaataaagttagtttgcttttatagtcaaaaaaaaaaaaaaaaaaaaaaaanttggnccccncccngggggcnttaaaaggggaaa

SEQ ID NO: 452 - DNA, 410 bp, Homo sapiens
  misc_feature 305, 310, 313, 315, 334, 336, 343, 352, 357, 362, 373, 377,380, 392, 396: n = A,T,C or G
ctgtctcaggatccaaggaacgtttgggttttcctagctacatctggtaccttggctggcattatgggaatgaggttctaccactctggaaaattcatgcctgcaggtttaattgcaggtgccagtttgctgatggccgccaaagttggagttcgtatgttgatgacatctgattagcagaagtcatgttccagcttggactcatgaaggattaaaaatctgcatcttccactattttcaatgtattaagagaaataagtgcagcatttttgcatctgacattttacctaaaaaaaaaaaaaacnccaanttngncggagggggggaaaatcantngtaaccnttttaaccntacanaaggngggggagcttntaanatngaccttattganaccntcttaaaaaccatt

SEQ ID NO: 453 - DNA, 385 bp, Homo sapiens
ggaacagcttatgtggtctatgaggacatctttgatgccaagaatgcatgtgatcacctatcgggattcaatgtttgtaacagataccttgtggttttgtactataatgccaacagggcatttcagaagatggacacaaagaagaaggaggaacagttgaagcttctcaaggagaaatatggcatcaacacagatccaccaaaataaatgttttctacattttcatttggactaaatcccacgaatgacaactaccacctttttttcctttttaattaatactaaatattgtgatttcttatttgaggttcaaaatgacctgcttgaaactttgatacatattggaatacattatgttaataaacttgtagctttttgtgaaact

SEQ ID NO: 454 - DNA, 467 bp, Homo sapiens
  misc_feature 398, 416, 421, 423, 429, 443, 450, 460, 465: n = A,T,C or G
cctttatacacatatgtctacacatagggatttggatgatctcgggatcccacatcctcgctgtcccctgtccccccgcaacatcccccaccaatacctttctgaagttttctagtccctcctttttgtttgtgctccttaaagcccagccccatgcctgactttggttcccagtgagcattgtacatttgtggatattaaatctttggcaaagtcatttacctgggctggaatagggctcttggctgattctttttcctaaacacccacccaatgggagaggctgatactcaacatgcaaaccttgtgttttatttctccaggcgaagggatgttggaagacattctggaaggggtggggtgtgaagatttacaaataatctttgaatatctgcttnatgataggtcttggaggngcctngngggtgngggtttggggggangggtacnaggaaattgnggatntt

SEQ ID NO: 455 - DNA, 601 bp, Homo sapiens
  misc_feature 4, 497, 530, 542, 543, 558, 592, 600: n = A,T,C or G
gctncaatttcaatgagaccttttgcattttttctcaaagcccttatgttctaacccatgagaaccattttacctgccctctaagggccaccagcttcgacctgcctcaggagacagcagcacagaccagtggctccctgtccaaggccgcagagcagacgccatcccactgtacaatcgaatttgctggacaaacttgataggtttctctgcttagcaacgagcctatagttagttggcacatctgcgttttggcatctgaggctcccatctgagtggaggagaaagtgttgtgtttattagcaggaagtcttgtgaaaacagctcgctgctgtgtatgtttatggatttttctgatataacaagccagcatggttaccgagtggtagagattctcgaacattctcaaactctcttttttgggtaaatgaatggtgcttaaaaataaaatttattaataaagaaggggaaaaaggagtaactctccctgactaaangtactctaattaattatttctttccaattaagnaaacccggaagnntgatttcatcacccnaaaatttttgaattttagggaaccttttgccccnaaagatcnt

SEQ ID NO: 456 - DNA, 272 bp, Homo sapiens
ccttacattagaagccaagccaatcctttttcctttttttggaggtcccaccgagatagataggaacttggattgctgaattcaaaaacagagcccattcttaagatcacttggtgccttaaagacacgcattccaaagtggaatgtggttgaagaaagtgggccaggtggttgaagaaagccatgtgggagctcagcaaatcccaagggcttattatgacactccagatggtctccttagcatctcagctcttctgcaaggaagagcttgg

SEQ ID NO: 457 - DNA, 431 bp, Homo sapiens
  misc_feature 394: n = A,T,C or G
aaaatttagattagcacaccttactaatctgacagaacctggattctcttgatattggaagaagatgagagtggataccggggaagtcactagaagtatctgtcactcttggctggacagcaggctgcaaacatattaccacttgatggaggcatcatgctctggtcgcaatccgtgtgcatcaggtaccagtaacaaagtggtactgagaaatatcctcatgtcacatagatctcaatatgccattggtcaaggaggttgtccagaaggaaattaggacgttatcaaggatgaagctatagtaaaaatactataaacaaacctttcttgatgaggcttaagggttatttagaggagtataaccttaaaaataaagatgaaaaatttatgaacngggctcttgttttcatgatgagagagtcgtgcagtcc

SEQ ID NO: 458 - DNA, 571 bp, Homo sapiens
  misc_feature 425, 490, 506, 526, 540, 541, 555: n = A,T,C or G
aaaaacattacttgaattaggattacacaaaaaaaactaaattctaagtgagcacaactatcgctgagaccctgaaatttcaggaaataaacatggttcaaaactcaaactgttcatcaaaataattacgcaggtcagccaccactgcagaaccatcactgctcagaggaattgagtcagcaatgactgatctcatcatctcttcattagcacataagcggttcaacttgggatacgcaaggagtctctgcagaggtacgaaaaatttatctccaacacagaagggtgtgggagagttctctatcttggccttctcaacctctgtgaagactggtccaaagcatgggacaggggcctttgagccaccaatgtctttgggcttatcaccccgttccccagcctgttctttccgcttggcaggtggntcactcttaactttcacttgttgggacacctcattaccacacaagtttacctgcccggcggccgntcaaaggcgaattccnccactggcggccgtactagnggatccgactcggnnccaacttgcgaaanatgggcatactgttcc

SEQ ID NO: 459 - DNA, 509 bp, Homo sapiens
  misc_feature 368, 382, 394, 416, 419, 421, 436, 443, 452, 453, 462, 463,478, 492, 501, 502: n = A,T,C or G
aaaaagagcacattccattctggtgcacacaaatgtacattaaaaataaaataaaaaagtgtaagagtacatttcaagggaatccctgcctctcccttggctcgctggcaaatgattcacaaccaaaacatttctgggatatgtgacttaaggaataaaaaaactcagtgttttataaaagggaatggcaggatgaggaaatgatttatcaagatacaattttactaataattacttctcaaataacttaaaaatgttttataacaaaaaatcaaaatgaaacaaaacttggtagttgaatataagtattttcaactgttacaatacttgaggagatttttcggtctaatttctcagaaattaggccnaaagaatagctttntttaacagaatnctaaaaaaatttcaatgtgaangantnatctaggattacaanacttatnttttacaannacatccatnntttcttaaaatttanttgttaggggtctnaagttaaannagccttg

SEQ ID NO: 460 - DNA, 253 bp, Homo sapiens
  misc_feature 247, 248: n = A,T,C or G
aaaggctttctttgagctcatttgtaggcttatctacctactgagtaaagtagttgggtgtcctaattttattaataggattaatttttattataaatcattagagatgttttgatactttagttaaaactgctttttagtaaatttgtttttctttgcagatatgagggaaggcaccattggagatatggctatcctgggtataacagaaagttttcaagtgaagctacaggttcttctgagtgcnnctgaa

SEQ ID NO: 461 - DNA, 569 bp, Homo sapiens
  misc_feature 396, 480, 501, 510, 534, 535, 545, 546, 555, 561, 564: n = A,T,C or G
ccagcccctccttgttccagccggtggtgtgacttcgttggttgaggtgtgtctccaacctacatcagaccatgaagttcaacccctccagggaagctcctgatttcccctgcataattgaaaataggatatttctcagctattgaacagttactaatttatggggtggaaacagcattaagaatactgaatcaaatggaaaaacaaatgaatacaggaagataagtgttcgttcttttctgaaaaagagtatgtgtaccacaagagctggttttaattgggtgaattgtttttgtcctcattctgtacagaaatttgtatatatgatggttcttagaacttgttttaatttttgtggtccttctgtttatttataataggcgtccaccaatgatnattccatatgtgttcttaatttttaactgctggaagtgttaaaacacacacacacacacacacacattttttttttgaaactcnaaagtcctgaaaaattttggnggaaaaatnatttttacttgcccggggcggccnntcaaaagggnnaattccacncatggnggnccgtt

SEQ ID NO: 462 - DNA, 402 bp, Homo sapiens
ctgctgttttcctggaatagtccttgagtaatcccgcaggtacttggagagttccatctcaatggccccgccaccagccaccactgaatcattcttgatggccctcctgacgatcatgatggcatcatgcagggaccgctctgtctcctccataaactgctcggcgccgccacggagaatgaaggtgcatgtcttggccttggggcagccagtaaaaaaattgtacctctcgcctccaatctgggtctcttcaaacacctggcatcgacccagcacatctgctgacagagcattcacactggtctggattgagcctccacaggccatcattgtcctcttcagatcctcctcaggtactcggccagcacagaacatgtccctgtcagcaaaagtactgggtgg

SEQ ID NO: 463 - DNA, 569 bp, Homo sapiens
  misc_feature 359, 444, 469, 478, 503, 504, 510, 539, 554, 561, 563: n = A,T,C or G
aaattttgtagccattcttatgatgctcttgatttgttggttacacaaatcaattttattaaaaatccaaagataagtctttaggtatattttgtaccaaattaaattagaagataaaaattgtgctttcatagttgctacaaaggtaaataatggagagatttggtacaaaacaacaaaatatatatatattctcatatatatatatatagctgataaaattacctgaggagtgtaatgtttatttttttgtgtatatctttgcaatctattttatatatattgacaaaagagactgtgaaatacttagccatgcagaatatgtgaccagaccagagcatgtgtaggaagactttacngtaatcattaactctccccgaaatgatggactacaagttataatgtgtgttacctacacttcaatcagtaatattagcaaatctncaaatgttagtcacattgggttggnctcccttgnacatctttattcatggatttacaanngcttgnactgggggggcctttttaacttgggccgnaacccccttaagggnaattccncncactgg

SEQ ID NO: 464 - DNA, 221 bp, Homo sapiens
  misc_feature 213, 217: n = A,T,C or G
aaataaattcacacaaagaaagagaaatagaaagcgacggtagtgaccagcaagaggaataataattacattcatcttaatgtgtgtgtgccagttctgtttacattaacattggaaaactccagacctggaatccagaacctcaaatctgtgagtggaatgtcttgagatgggcacgtggaagtcaaagggtttctcttttttttttttttntttnaaaa

SEQ ID NO: 465 - DNA, 482 bp, Homo sapiens
  misc_feature 371, 421, 476: n = A,T,C or G
cctgctcgctgggcagacataccatgtggctgtggtctgctacctgaggtctcaggtcagagccacctaccatggaagtttcagtacaaagaaatctcagcccccacctccacagccagcaaggtcagcttctagttcaaccatcaatctaatggtgagcacagaaccattggctctcactgaaacagatatatgcaagttgccgaaagacgaaggaacttgcagggatttcatattaaaatggtactatgatccaaacaccaaaagctgtgcaagattctggtatggaggttgtggtggaaacgaaaacaaatttggatcacagaaagaatgtgaaaaggtttgcgctcctgtgctcgccaaacccggantcatcagtgtgatgggaacctaacgtgggtggacctcggccgcgaacacnctaaggcgaattccagcacacttggcggccgtacttagtgggatccaacttcggnaccaac

SEQ ID NO: 466 - DNA, 192 bp, Homo sapiens
  misc_feature 136, 166, 172: n = A,T,C or G
ctgcttgggaggctgaggcaggagaatcacttgaaccctggaggtggcggttgcagtgagcacagatcatgccactgcactccagcctgggcaacaaaacgagacttcgtctcaaaaaaaaaaaaaaaaaaaaaanaccctcgattttggcccttggggggggttnccccanttttttttggggggccatgg

SEQ ID NO: 467 - DNA, 484 bp, Homo sapiens
  misc_feature 368, 423, 429, 438, 450, 451, 471, 477, 481, 482, 483: n = A,T,C or G
cctgctcgctgggcaagacataccatgtggctgtggtctgctacctgaggtctcaggtcagagccacctaccatggaagtttcagtacaaagaaatctcagcccccacctccacagccagcaaggtcagcttctagttcaaccatcaatctaatggtgagcacagaaccattggctctcactgaaacagatatatgcaagttgccgaaagacgaaagaacttgcagggatttcatattaaaatggtactatgatccaaacaccaaaagctgtgcaagattctggtatggaggttgtggtggaaacgaaaacaaatttggtccagaaagaatgtgaaaaggttgcgctctgtgttgccaacccggatcntaatgtgatgggacctaacgtggtggactcggcgcaacacctaaggcaattcacncctgcnggcgtctanggatccactcgnncaacttgcgaatatggctantgttcntagnnnc

SEQ ID NO: 468 - DNA, 488 bp, Homo sapiens
  misc_feature 26, 374, 392, 415, 427, 442, 449, 450: n = A,T,C or G
agaattccccttcgagcggccgccgngcaggtaaaggaaacacaacctatttgtgggagcttcttttagatctacttcaagataaaaatacttgtcccaggtatattaaatggactcagagagaaaaaggcatattcaagctggtggattcaaaggctgtctctaagctttggggaaagcataagaacaaaccagacatgaactatgaaaccatgggacgagctttgagatactactaccaaaggggaattcttgcaaaggttgaaggacagaggcttgtatatcagttcaaggatatgccgaaaaacatagtggcatagatgatgacaaaagtgaacctgtatgaagattagcaggactctgtgaaaatcttngaacgagtgcctgctgcnaaagctctgaacacatcttgtcnagggaaaatctnccttactgtcaacanaaagggnntgatggattctcctggccagtttcagtctctcctgttg

SEQ ID NO: 469 - DNA, 468 bp, Homo sapiens
  misc_feature 286, 368, 392, 403, 408: n = A,T,C or G
tgcagaattcgccctttcgagcggcccgcccgggcagagtccattaaagtgctggaaattttcttaatcatgataacatttgttaaaaagaaatcagaactaatatcaggaacatggcggcatgaaggaaacagttcccttacaaaacacagaaaatggaagcccctcatgttgagggggtgggttggacaatttgcaaacagattctaatttcctctcccgtcagcaccaaactggctgggaccaccacccctgggtgaaagaaacaacactaaagaaccctaanaacacccacacaccctgactccaccacctctgggcatctgtgggcgtttgcttgtttgaacagatccagtctcaggaaagangaagacctgcctcggcccgacccnctaaggcgatnccacncctgccggccgtctagtggatcgactcgtccaacttgcgtatatggcatgctgttctgtg

SEQ ID NO: 470 - DNA, 341 bp, Homo sapiens
  misc_feature 50, 154, 212, 213, 250, 252, 272, 278, 281, 300, 304, 311,326, 327, 334: n = A,T,C or G
cagaattccccttagcgtggtcgcggccgaagtctgcaattacatcattntttatctatcttctgcttttactttgtgtagggtagggatggggacttacaaatgggccaaagacacttcaacctcaaaaccaaagagaaatctctgcttgcanagatacaaagaaagtaactctccctcttatgaaaagcaaccaggaactctactccacnnatgagggcactgatggtgtgggagagctatcaagaanantcttcctacacgtggcgcgngagacngtnagaactctgaaatcacatncatngacactngctcttaccatcatnncactctnttgtatc

SEQ ID NO: 471 - DNA, 509 bp, Homo sapiens
  misc_feature 313, 350, 370, 379, 383, 384, 391, 400, 401, 405, 428, 472,491, 493, 508: n = A,T,C or G
cagaattcgcccttagcagtggtcgcggccgaagtctgagcgatgatagatatcatcatgcactggtcggatatgtgccctctggaaagagatcagcctggttccccagggggatccatgtcatatgcctggtatacactttgtggttcacgtacagttcgttggggtcagaggaatctttagcagcatgggggttccgagtgcatctgacctggagacgaaactgtagagtatctatctctgtgccttcttcatctccttggttccgatactcaaaaagacggggatcagcatgaatgggaatgagccccanacggtgagcaagaatctcattctgacaatggatgatnattgtcccaggaccttctcncagccatantggnncctcacntacaaattnncganagcattgccatggtggtaatccncatgcaactcaggagtttatcctgtgtctcatcccccgaatctntcaagcgcctgtccagctntntaccgatagccggang

SEQ ID NO: 472 - DNA, 370 bp, Homo sapiens
  misc_feature 19, 31, 360: n = A,T,C or G
cagaattccccttcgagcngccgccgggcangtccagcaagtcaagtggtaatcaaaactctgctagagccagaacgaaactccctcataatcacgtctcgttccttttggtccatatctccatgcatggcggatacagtgaaatctcgagcatgcatcttctcggtgagccagtccaccttcctccgggtgttgatgaagatgactgcctgggtgatggtcagggtttcatacaagtcacatagtgtgtccagcttccactcctctcgttccacgttgatgtagaactggcggataccctccaaggtcaactcttccttcttgacaagaatccgaatggggccctcatgaacttcttgncacctcaagc

SEQ ID NO: 473 - DNA, 80 bp, Homo sapiens
  misc_feature 25, 45, 50, 55, 66, 67, 68: n = A,T,C or G
cagaattcgccttagcgtggtcgcngccgaagtcaagcttttttntttcnttttncttcccaaaannntttttttttttt

SEQ ID NO: 474 - DNA, 512 bp, Homo sapiens
  misc_feature 387, 394, 399, 402, 410, 414, 423, 429, 431: n = A,T,C or G
gcagaattcgcccttagcagtggtcgcggccgagagtctgacctgactttgctttaagtcattcttttttatgccagcactgtttgaaagtgcatgtcaagcggctagctccacatttggtcttcgaaagggaaacgcatgcagttaaaacgtaatgtacatgatggaattgggaggatcatagtctcagtttccccccccctttctcccatctaggagacctccatggactgcagcaaaattaaaaataaagcacagacaacagaattattcttcactgagagagtttaatatgcgtttctaacaccatctatacttgctttgttgttcttgaagcatcaacacacattctggtattccagactaaagctcttgtggtgctactcngtttaanagatnaancatactancttncgtttcagnagtttntnttaattttccctactcttagtcagggactcagaaggatcagcgctggataaccatagaagtccagtttaggaaaagccacg

SEQ ID NO: 475 - DNA, 61 bp, Homo sapiens
  misc_feature 26, 28, 33, 37, 45, 49, 51: n = A,T,C or G
gcaaaaattcgcccttaaagagagtngngggcncgcnaacacaangcangncgcgccccac

SEQ ID NO: 476 - DNA, 441 bp, Homo sapiens
  misc_feature 337, 387, 392, 407: n = A,T,C or G
gcagaattcgcccttagcagtggtcgcggccgaagtaaacttcagctcagtttcttaaccaagaaccacgtcaaccctccagggttgtggtttgtatttttgcctttaagcattatctcctttccaccaagaagcctacttaggtttaacacatgaaggcagtgtctaaaaattagatcggtcctaaattggaatgggatgtcttccttgcatgtcccataccagggaatttttttaacacacagtgtagagcctttgccagagatgttgaaagggagattaaaggcttgagggatgaatttgatcatcattcttaaagtccttcaatcctgtgatnctctgattccctgagtctcgttattttggacatgcctagccagtaccagngaccngccgcttttggtggnttccttgatacggagagctatacacatgccttgt

SEQ ID NO: 477 - DNA, 470 bp, Homo sapiens
  misc_feature 25, 311, 322, 327, 343, 351, 352, 356, 362, 369, 371, 383,397, 400, 406, 408, 420, 426, 430, 433, 458, 460, 461: n = A,T,C or G
gggtaaagccatttacataatatangaaagatatgcatatatctagaaggtatgtggcatttatttggataaaattctcaattcagagaaatcatctgatgtttctatagtcactttgccagctcaaaagaaaacaataccctatgtagttgtggaagtttatgctaatattgtgtaactgatattaaacctaaatgttctgctaccctgttggtataaagatattttgagcagactgtaacaagaaaaaaaaaatcatgcattcttagcaaaattgcctagtatgttaatttgctcaaaatacaatggtngattttatgcncttgncgctataacatccctntttcatgnngatncaatantgagtantntagaacctcttntaggaattatagtngcncagaanancttgtttcttgncatggncaanttnatctttgccttggggggacgccacngnnggtcggccg

SEQ ID NO: 478 - DNA, 123 bp, Homo sapiens
  misc_feature 8, 31, 32, 40, 54, 68, 80, 89, 93, 99, 106, 107, 114, 118: n = A,T,C or G
tggaggtnggtgcctgtgaagtccatccgtnntctcccantcctcttgatcatnatgacatttgttcncaaagaaatcanaactttcgncatntccggngggcgcnngaatganacanctctc

SEQ ID NO: 479 - DNA, 63 bp, Homo sapiens
  misc_feature 8, 29, 42, 45, 49, 52: n = A,T,C or G
ggtcaccngttcaccaggccgtgtggccnccctctcacgatntgntganttncggaccatttg

SEQ ID NO: 480 - DNA, 465 bp, Homo sapiens
  misc_feature 319, 321, 326, 337, 349, 384, 388, 399, 408, 421, 432, 440,450, 457: n = A,T,C or G
aaatcatacggacaaacaactttcaaacaaaactggattagtaggatttcttgcctgcttaactaacatgacagacttcttgtcccaagcccttctcagaaaaacctcatgtggaaaccaagctagagataagaattcttccctgatgcagttaggggaaagggaaaggctagaaacttctttggcaagcaattccacacacagccatttatgtgtgagtgctctgcttcaagcacagtacactctttgcagggacggccagatgttcagagtgggagtggtcttttcaaccagctaaaagtgcagaagtcatctagtngntgctnttccactgccntgctgcagcttnagaactttaacacccttggctgaatttgagtaaancagntgactggtgcntggggctcntgaaaggaatggngggtggaccgnaaccccanctgatacctnaagattngggaagag

SEQ ID NO: 481 - DNA, 449 bp, Homo sapiens
  misc_feature 263, 272, 333, 335, 338, 349, 358, 360, 377, 389, 395, 403,408, 415, 416, 421, 428, 431: n = A,T,C or G
aaaatttagattagcacaccttactaatctgacagaacctggattctcttgatattggaagaagatgagagtggataccggggaagtcactagaagtatctgtcactcttggctggacagcaggctgcaaacatattaccacttgatggaggcatcatgctctggtcgcaatccgtgtgcatcaggtaccagtaacaaagtggtactgagaaatatcctcatgtcacatagatctcaatatgccattggtcaaggaggttgtncagaaaganattaggacgttatcaaggatgaactatagtaaaaatctattaacaacctttcttgataagntnaanggtatttaaangaggtaacntnaaataagatgaaaattntgaccggggttnttcttntgagaganactgnagcaccnnccggngccgtcnaangggatccacccctgctgc

SEQ ID NO: 482 - DNA, 401 bp, Homo sapiens
  misc_feature 27, 270, 315, 319, 320, 335, 367, 374: n = A,T,C or G
atctcttcttcctcaagagtcaagctnggctcccttcttgcggcccaagggcagcgcatagtgggactcgtaccactgtcggtacggtgtgctgtcgatgagcacgatgcaattcttcaccagggtcttggtacgaaccagctcgttattagatgcattgtagacaacatcgatgatccttgttttacgagtacaacactctgagccccaggagaaattccccacgtccaacctcagggcacggtatttcttgttacctccccgcacacngactgtgtggatgcggcgggggcaatcttggtgttggcaacctcngccnnaacacgcttagggcnattccacacactggcggccgtactatggatcnactcggnccaacttgcgtaatatggcatactgtt

SEQ ID NO: 483 - DNA, 230 bp, Homo sapiens
  misc_feature 14, 137, 165, 166, 203, 214, 217: n = A,T,C or G
ctgagctcgcctgnaccacaagtttgacctgatgtatgcaaagcgtgcctttgttcactggtacgtgggtgaggggatggaggaaggcgagttttcagaggcccgtgaggacatggctgcccttgagaaagattatnagagaggttggagcagatagtgctgacnngagaggatgagggtgaagagtttaacctgtgcgctgncttttacactnctntgtttggaactgt

SEQ ID NO: 484 - DNA, 498 bp, Homo sapiens
  misc_feature 36, 293, 397, 415, 416, 439, 450, 462, 486: n = A,T,C or G
gcagaattcgccctttcgagcggcccgcccgggcangtaaaaggatttttatctttcgtgataaactttgctgtgtaccaggaactataaaaacaaaaacttgttactaaagaaaatatctgaaatgtgataagttcttatgccatgttaatttcatgtgtcaacttcaacatttacatgtattatttcattatgtaaaatgttttagcaatttaatattttgcacagttagcaaactttgtatgtcatttccttcaaggcatcatgcagagttgacatgagatttataaggntttaagttgtttgcatgtgaaaatcaaatacatactttggtagctttgaatacaaagcatctgctcttggtttcaagaattttgagacacaaagtggatgtaangaatatattaattgccgnntctaggagattgctcaaaagagnaatcacttatntgtcaatgatantggaactgggaattctttgtgcangttggagtcatt

SEQ ID NO: 485 - DNA, 491 bp, Homo sapiens
  misc_feature 192, 263, 275, 288, 291, 347, 354, 365, 379, 385, 395, 413,422, 445, 446, 458, 473: n = A,T,C or G
gcagaattccccttagcgtggtcgcggcccgaagtccattgtctgtgaagtagagggaatcacggagagaggagccaagggggaagccagtcgccggcttgaagagtggggaggtgaagtccacggtcctcctgacgaactccaggtccccggcgcctgccccataggggaagagggaaactcctctctcangcaggatggggatgggggcaggtgaggcgctcacagcctcgcgaaggtggagaagggcaggggcaggagangctgcggaggangggcacggtgcancangccgtggggactgcatgcactctcctggtgtcacatgcccacagcacctcgtgacnaagcacngacccaaaagnggggtgtcgtgctntgcccngatttactcnttgtcaaacccggtaccntccaatctntggctgctggccctgccttttcnntttcatggtggncggccctgcttccancttccttttctttcatgg

SEQ ID NO: 486 - DNA, 518 bp, Homo sapiens
  misc_feature 22, 33, 60, 348, 357, 384, 408, 423, 446, 448, 491, 510, 517: n = A,T,C or G
gcagaattcgcccttagcggcncgcccgggcangtgggatcgcaaggctgaggatgccanagagggactatgaaaaagccatgaaagaatatgaaggggaccgaggcgagtcttctaagagggacaagtcaaagaagaagaagaaagtaaaggtaaagatggaaaagaaatccacgccctctaggggctcatcatccaagtcgtcctcaaagcagctaagcgagagcttcaagagcaaagagtttgtgtctagtgatgagagctcttcgggagagaacaagagcaaaaagaagaggaggaggagcgaggactctgaagaagaaaactaccagtactcccacagctcanaagactcancgtcaggatccgatgagtagaacggangaaggtctctttcgcttgcctttnacccccccgctcccnccatttttggtccagttctctcntnaatgcatcctggttctggcctctgacatctctctgtggtgtgntgcctaggcagggggaacnctacttnt

SEQ ID NO: 487 - DNA, 519 bp, Homo sapiens
  misc_feature 331, 386, 403, 410, 417, 433, 441, 518: n = A,T,C or G
tgcagaattcgcccttagccgtggtcgcggcccgaagctgagagaggtgctttcattgatcaaagccaatctttgaacatccacattgctgagcctaactatggcaaactcactagtatgcacttctacggctggaagcagggtttgaagactgggatgtattatttaaggacaagaccagcggctaatccaatccagttcactctaaataaggagaagctaaaagataaagaaaaggtatcaaaagaggaagaagagaaggagaggaacacagcagccatggtgtgctctttggagaatagagatgaatgtctgatgtgtggatcctgangaaagacttggaagaaccagcatgtcttcagtagccaactacttcttgagcatanataggatagtgggttgnttgaggnggtaagntttgctggccctgttnaggcaaangagaattgattacctgccggcggccgtcaaggcgaatccaccactggcgccgtctatggtccactcgtccaactgcnt

SEQ ID NO: 488 - DNA, 502 bp, Homo sapiens
  misc_feature 310, 361, 388, 394, 400, 401, 404, 424, 426, 432, 465, 467,470, 482, 491: n = A,T,C or G
gcagaattcgcccttagcagtggtcgcggccgaagtaaaatactttatttagccaaatggtttcttgaatcttagctacagagaaatttttacattaaagaacatcatgattatcacaacaacttacttagcacttgcgtgtactaagtgctgcactaagacattgtagtttccagtgtcttgaaccaacctgggaaaaatatcagtggtgagggttcagtgtttgtatatggaggatggtgcaaactgaattattcccataaagctgcttggtaattccagagaaagcacacagccaccttctcattanaaggagggtagggataggtgttatggtgaaaaactgagatgctgtggatcnagggcagaagacctaaagaaatctctntccttntgagcnnccntgtggaggactcgacctctncnatgggnctgggaggacatcaggccatttcttcgatgatntngancccagaggagcncttggagcnggtaataattg

SEQ ID NO: 489 - DNA, 507 bp, Homo sapiens
  misc_feature 349, 381, 429, 440, 452, 464, 467, 479, 495, 506, 507: n = A,T,C or G
gcagaattcgccctttcgagcggcccgcccgggcaggtaaaggaaacacaacctatttgtgggagtttcttttagatctacttcaagataaaaatacttgtcccaggtatattaaatggactcagagagaaaaaggcatattcaagctggtggattcaaaggctgtctctaagctttggggaaagcataagaacaaaccagacatgaactatgaaaccatgggacgagctttgagatactactaccaaaggggaattcttgcaaaggttgaaggacagaggcttgtatatcagttcaaggatatgccgaaaaacatagtggcatagatgatgacaaaagtgaacctgtntgaagattagcaggactactgatgaaaaatcntagaacaatgcctgctgcagaaagctctgaaacacatctctgtccagnggaaaaatctncctatactgtcngacagagaaggngantagagtgtgatntccttcctggccgatnttatcagctcnn

SEQ ID NO: 490 - DNA, 480 bp, Homo sapiens
  misc_feature 336, 384, 397, 405, 415, 417, 439, 467, 470, 478: n = A,T,C or G
ccaattatgcccctgcaaagaacaggaagaagactgctgcaggcagggcatcagtggtttttgtggacagaaccctggatctcacaggagcagttggacatcatggagacaacttagtagagaagatcatttcagcacttcccagctcccaggccacacaaatgatgtgatggttaacatgatagcgctcactgcactccatactgaggaggaaaattataatgtggttgcaccaggctgtctttcacaatccagtgacaccacagccaaagccctatgggaagctttctgaacactaagcacaaagaagcagtgatggaagttcggaacatctantggaagcggcagcagagaaacctgccatcagatgagtatgggagagtncaccggacagctntgtccttnttcactcttnanacacctaaactctatgaatatngtggctctcacttgactggactgccggngcntaaggcantt

SEQ ID NO: 491 - DNA, 476 bp, Homo sapiens
  misc_feature 301, 421, 429, 463, 464, 469, 474, 475: n = A,T,C or G
agttgtcataatgcaaattttattttgattagtttttgtgactcctttatcttaaacccagcgatgcttgccacttcccaaggtgtaaaaatgtgaagattaaggtaaactgaatgtcgaggagtgtaaagagatggcaaaacacagataaaaacatccaaaaagcctctgggggcaggtcaagcttatgattcaacagttagaaaaccaaaattacttggacatccccttctacttaaagtgatatactggaattgaaaatattaactgttagttttagaaactaagattcttgaagtangctcattccagaatgctttcttttttcttcctgaacaattacatcaacttagatatcctaatgttattttagatatactccttaaagcattatgtcaccctttcgagatgagaaattacntactaatnacttacattgtcttagactggtttgtagataggnncaagnctagnng

SEQ ID NO: 492 - DNA, 481 bp, Homo sapiens
  misc_feature 326, 393, 402, 446, 451, 452, 477: n = A,T,C or G
gtggagggagaatcacgacatcattcataaataactgtggagtctgggatgctggctgaaggcatctccaggaaggactggagggcgattttgctaaagggctgctcactgctcatttcactgcatgccgcttttctcactttggttgggagtttgaaggaccatgtaatcacagagattagagctccctgtgaaatcaatcactgcctttagatctccacaaagacctgttctccaatagcacatgcgtttctctgtgagctgtattcgcatcagcgccggacctcagaaagaatgcgtgttacactctgtactctccaatgggnatatttatcatagaaatctaatacatattcttcagtcttgaatccaacttctggacagtacatagcngggtgcttntgaacgtgaaaggtacgtcttgccttcaggctgccaagatgganaatcnngataaatggaaggactcggcccacnccct

SEQ ID NO: 493 - DNA, 468 bp, Homo sapiens
  misc_feature 399, 448, 459: n = A,T,C or G
cgaagtctgtttacagaaatatagttgcgaagtatacaaatgttccaatagaagcaaaatatctttttaatatttaacaagttatcacagatagctaaaaacatagatgcaaatgaaattcccccagagaacaaactgaaaatatctggtatcagtgctctgaaatcccaactatgaaagccatatacacaaaaatgtaacccttatatcattgcaggacaatggaagaaggcagttcagtggttgatcagtgtgctcaagcaaataaaattaaataaaaattaaaaatggcagaatggtagctaacccttgagaacagggtaatgaaattattggtctatacttaaacattaagtaaaagaaggaatgaactcattactgcccggcggccgtcgaaanggcaattcacacactgccggcgtctagtggtcgactcgtccacttgggnatatggcatantgttctgtg

SEQ ID NO: 494 - DNA, 481 bp, Homo sapiens
  misc_feature 26, 37, 39, 79, 94, 96, 107, 134, 135, 299, 312, 327, 340,371, 372, 383, 391, 394, 406, 407, 413, 419, 423, 448, 449,452, 466, 471, 475: n = A,T,C or G
tgcagaattcgccctttcgagcggcncgcccgggcangngtcacctcttctaatcttttaatgtatttgtttgcaattntggggtaagactttntntatgagtactntttctttgaagttttagcggtcaattnngcctttttaatgaacatgtgaagttatactgtggctatgcaacagctctcacctacgcgagtcttactttgagttagtgccataatagaccactgtatgtttacttctcaccatttgagttgccatcttgtttcacactagtcacattcttgtttaagtgcctntagttttaacagntcactttttacagantatttactgaagnatttattaaatatgcctaaaatcttaaaccnnaaaaaaaaaangaaaatantcnctaaaaaacctnngcgganccctangggnaatccaccctggcggcggtctaggnnccnaccggccaactggngatcnggcntctggt

SEQ ID NO: 495 - DNA, 476 bp, Homo sapiens
  misc_feature 322, 367, 374, 393, 430, 475, 476: n = A,T,C or G
tacattgtacagggctaggcaaccctgttcttcccagacagccatattaaatgaaagccactaaagtgaactcttaattacataaaacatatccattatctgattgccctttaggaagtatactgaagatgcaagtttttttcatctggagttctgcctgaccaagaattaagcctataaatctatcttgccattcaagcagagagcactggacaaactgaagcacaaaaacaaataagcaaaacttatacaaacagcatgggggttgggggtgagggacttaaaagtagacatgctacacctaatgcaagaacagcttggnttctttgccagatatccttgtgacacatggattgagatcaatggnctcacanggatctaaaatgcatgttntgatatgactaaagagcctctggatggactcggcgcnaccgctaaggcgaatccaccactggcggcgtctatgggatcgacnn

SEQ ID NO: 496 - DNA, 478 bp, Homo sapiens
  misc_feature 277, 343, 354, 440, 447, 458, 460, 463, 470, 473: n = A,T,C or G
ctgaaagaagcccaagtacacgtatcctctccagacatttgcaattggcatggaagacagccccgatttactggctgctagaaaggtggcagatcatattggaagtgaacattatgaagtcctttttaactctgaggaaggcattcaggctctggatgaagtcatattttccttggaaacttatgacattcaacagttcgtgcttcagtaggtatgtatttaatttccaagtatattcggaagaacacagatagcgtggtgatcttctctggagaangatcagatgaacttacgcaggggtacatatattttcacaaggctccttctcctgaaaaaccgagangagagtgagangttctgagggaactctatttgtttgatgtcttcgcgcagatcgactctgtgccatggcttgactgagagccattctagacatcatntcttctntctgctctgcncngantgaaatncanaatgg

SEQ ID NO: 497 - DNA, 399 bp, Homo sapiens
  misc_feature 205, 246, 253, 292, 322, 333, 342, 345, 356, 386, 389: n = A,T,C or G
cctggtcacctctgtagcctactcttatgacacatgggtggaggcaagggtaaccagagtccttgttctttcttttgattggggtcatccagcccttccgatgtgtggtcagggagcagagtcactgataggatgttgagacttggagatcaggaccagacttttccccattcttgcatctggcctgtgcttgggcaggacctcnggtgaaggatgatcttggaatcacccttttgtcagccccangaaagantggctggagtggcttctacaaacttctctcattactttncctcatggaactaagccttatgtcatgttntagaacacganactgaactncanagagtgctcanagacaccaggacacctggcttcttctttgntgnataaatgcac

SEQ ID NO: 498 - DNA, 471 bp, Homo sapiens
  misc_feature 62, 314, 357, 389, 391, 398, 470: n = A,T,C or G
ccaaagcagccagggaagagtgccctgtgtttacaccgcccggaggagagacgctggaccangtgaaaatgcgtggaatagacttttttgaatttctttgtcaactaatcctgaaagaagcagatcaaaaagaacagttttcccaaggatctccaagcaactgtctggaaacttctttggcagagatatttcctttaggaaaaaatcacagctctaaagttaattcagacagcggtattccaggattagcagccagtgtcttagttgtgagtcacggtgcttacatgagaagtctgttgattattttctgctgncttaagtgtccttccaccactctgagcagatctgacttatgtnagtcactcccatacagggatgagctcttatcntnactttgngaagaagaaagtaaccacggtcatgttttgttgacctcaggactctaatggctgctgactcctaggtaattnt

SEQ ID NO: 499 - DNA, 65 bp, Homo sapiens
  misc_feature 5, 9, 10, 15, 22, 35, 38, 60: n = A,T,C or G
ccccntaanngagtnaggttcnattcaccagagcngtncgctccccctctatcatgcatntatca

SEQ ID NO: 500 - DNA, 343 bp, Homo sapiens
  misc_feature 133, 159, 182, 225, 229, 238, 260, 287, 288, 299, 309, 314: n = A,T,C or G
cctacccattctcctagtttcttgttgtcatcaaccttaattaggttgatttggtgttcagcacaaaaggcctccaccaacttgacatacataggctcatcacagttggatgcaagcacacaaagatgggctnggcgccttttcctaagtttccggtangacggatgccattcagaactttngcgctaacaccatgaactccatgccttcttccttgggtggcangttntgttccggntgcaagaacccacagtattganactgatacacttacttgtctaaagctnnggcagcttcgngaattcacgngctangccatcttggtgaaggcagtcttacaacc

SEQ ID NO: 501 - DNA, 464 bp, Homo sapiens
  misc_feature 50, 284, 314, 317, 381, 384, 391, 445, 458, 464: n = A,T,C or G
tgcgagaatgaagactattctcagcaatcagactgtcgacattccagaanatgtcgacattactctgaagggacgcacagttatcgtgaagggccccagaggaaccctgcggagggacttcaatcacatcaatgtagaactcagccttcttggaaagaaaaaaaagaggctccgggttgacaaatggtggggtaacagaaaggaactggctaccgttcggactatttgtagtcatgtacagaacatgatcaaggggttacactgggcttccgttcaagatgagnctgtgtatgctccttcccatcacgtgtatncangagaatgggctcttgttgaatccaaattcttggtgaaaattatcccagggtcggtgagacaagngtnttgtcanatctcacccaaaagataataatcttgaagaatgcattgacttgttcaattacgntttgatcacaacncacatn

SEQ ID NO: 502 - DNA, 427 bp, Homo sapiens
  misc_feature 278, 287, 320, 335, 346, 357, 423: n = A,T,C or G
ctggcctttctagtcaagaagactaaggtcaatatggaagtagacataaggaaaatagtcttggttattgagttgcagtcccgggatctccacagatgcatccagtatacttgtagcggctacttcatccagatgtcggaagacagagtttagaacctctcttaaacgcttggtggatgacttcttatgcggctgcaggagcactgctggaagttcactggtagtccatacctgagcacggactccacaaacactctcaaggcttgatgtggatccangcaatgaangcttcactgaagttcaccttgaccagcgcacanggggcctcaccctcnacctcggccgnaacacgctaanggcgaattcacacactgcggccgttctagtggatcgactcgtccaacttggcgtaatctggcatantgtt

SEQ ID NO: 503 - DNA, 346 bp, Homo sapiens
  misc_feature 320: n = A,T,C or G
gtcctgttctgggagatggtcatattcacctgccaaaatctgctggaatcctttgatggtctccttcaggggtaccagcttccccatatgacctgtgaagacctcagcaacctggaatggttgagacaagaaacgctgtattttccgtgcacgggacacggtcaacttgtcttcctcagaaagttcatccatacccaggatggcaatgatatcctggagggatttgtagtcctgcaagatcttttgcaccccacgggcaacatcgtaatgctcactgccaacaatgttgggatccatgatacgagaggtggagtctagangatccacagactcggccgcgacacgc

SEQ ID NO: 504 - DNA, 77 bp, Homo sapiens
  misc_feature 12, 13, 34, 46, 48, 62, 67, 71: n = A,T,C or G
gtccgttaaacnntcacgagcgatccccataacnctgatgtcgagngnagaggataaatatngaganccangtcaca

SEQ ID NO: 505 - DNA, 430 bp, Homo sapiens
  misc_feature 319, 349, 354, 376, 391, 396, 407: n = A,T,C or G
ccattaaagtgctggaaattttcttaatcatgataacatttgttaaaaagaaatcagaactaatatcaggaacatggcggcatgaaggaaacagttcccttacaaaacacagaaaatggaagcccctcatgttgagggggtgggttggacaatttgcaaacagattctaatttcctctcaccgtcagcaccaaactggctgggaccaccacccctgggtgaaagaaacaacactaaagaaccctaaaaacacccacacaccctgactaccaccacctctgggcatctgtgggcgtttgctgttgaacagatccagctcngaaagaagaagactgcctcggccgcacccnctaanggcgaattcacacactggcggncgttctatgatccgnctcgnccaacttgcgnaatctggctactgttctgtgcgg

SEQ ID NO: 506 - DNA, 508 bp, Homo sapiens
  misc_feature 21, 51, 334, 337, 346, 394, 395, 405, 484, 493, 496, 502: n = A,T,C or G
tgcagaattcgccctaggggngtcgcggccgaggttttttttataaaactnttattattctagcaataataatgtgtgttaattttaggaatatagaaaatacaaacaagcaaaaggagaaaaatcattcataatcccaccaccgagaggctgtactttctttcatccttcacaagttatgtccatatatgtaatatacaaatgtctttttacctttcaaaaatatgatattcacatattacttagcctttttccattttatatcttaccaagaacctcttttttacaaatgtgtaaagttcttttattaaaagacagagacttgtagattggncanaatacaatnaacaatgagatgcagatacaagagatcatctaaaccattaatagcacnnggtataagtngaattggccaaggatatcaggaatgctataaaagcaactattggattgtattcgataaatcaggaactcataatagggnaggtggtcntanctcacnatcctt

SEQ ID NO: 507 - DNA, 477 bp, Homo sapiens
  misc_feature 294, 420, 425, 430, 455, 466, 467, 477: n = A,T,C or G
aaatcctccttgtcctaattggctatgttcctaacttgttttctatcactacagtgaatgctgcaatactgatataagaaaaaataaaataaaatagtaacctctgcttcaatgtacagtttccagaatctgccagaactggggaactgggcaacaaggcgttcataagtcttccgtgctttgtctataggttgattctaaaattgaaaaccaataaacagcatttacaatgttaggattatgaaaatattattcactgcagaaccaagtagtgtgattggacccatagagaangaaatgtaatctattcactaaacctgtgcctctcgaatgagatgctcaagcatcaaggcatatggatctctctaattctttccgtttcttcaccttctctgggacatactcagactgccgggcggncgtcnaaggngaatccacacctgcgggcgtctagngatccactcgnncaactggcgn

SEQ ID NO: 508 - DNA, 172 bp, Homo sapiens
  misc_feature 7, 11, 16, 18, 26, 61, 68, 85, 91, 93, 97, 103, 110, 115,119, 125, 132, 135, 141, 144, 145, 154, 165: n = A,T,C or G
ccccccnaaanaaagnangttacaanttcaccagagccgtctgttgccccttccggctatncatctcnatatctctagatacccntaatantnagtntaattncccatanattgnaatncggtanatatatntcnaaatancgnnacaattgcnctaaattctangatatca

SEQ ID NO: 509 - DNA, 457 bp, Homo sapiens
  misc_feature 312, 314, 334, 441, 451: n = A,T,C or G
ctgtttacagaaatatagttgcgagtatacaaatgttccaatagaagcaaaatatctttttaatatttaacaagttatcacagatagctaaaaacatagatgcaaatgaaattcccccagagaacaaactgaaaatatctggtatcagtgctctgaaatcccaactatgaaagccatatacacaaaaatgtaacccttatatcattgcaggacaatggaagaaggcagttcagtggttgatcagtgtgctcaagcaaataaaattaaataaaaattaaaaatggcagaatggtagctaacccttgagaacangntaatgaaatattggtctatncttaaacattaagtaaaagaagtgaatgaactcattactgccgggcggccgtcgaaaggcaattcacacactgccgccgtctagtgatcgactcgtccaacttggcnatctggctantgtttc

SEQ ID NO: 510 - DNA, 470 bp, Homo sapiens
  misc_feature 222, 296, 398, 426, 440, 461: n = A,T,C or G
tcctgattttttgtcttattccaactaagtagatcattatctctttccttttttatgttaatgagagaatttagcctccactcaacaatgttcaattcagcaaggctttcatatccttgctgtgggtcgtggataaggagcttattcaggtttcctgccctagctattagctccacttcacatgctggagaccggcgtagggacagatgtattcatcctggngttactgaaaaacaggtgtgatcctgttactgatactataagtgacctaaaatgcactgttcaaattagccagngtctaacaaactaaactcttcaaatgcttggaaagatctacaaagcaatcttatagaatgggccaaataaactatgtgtttgcatggtattgtaactccaangtcctggttctgccgtgtctggagtgcncctgctgggcaagntcttggctggtgagactgtgnctttcccta

SEQ ID NO: 511 - DNA, 513 bp, Homo sapiens
  misc_feature 37, 46, 65, 390, 394, 406, 415, 447, 451, 482, 508: n = A,T,C or G
tgcagaattcgcccttaagagagtcgcggcccgaagngtccggtcnctgaaaggatttatgtttntcttcgttagataagtgacttctgagcaagctgatctcccctggcatgctccaacctgattggacaaaggaagctctatggcctgggagagagactattcttaatttttctttcttacaaaaactgatttttcccataaatatttttacttcagaggactaggaccattttgttttgggcccttctgctgaaaatttgctcgtttaagaggcagctagaatctttaccatatgtatgaatttgtataattcatttttggatagggataaacttttgcttctgataaaagctggaattcatctggcctcacagcatgcgtgtgggncttnctgagcccgaanaggtttggnaagatctgggatggcagtgttagctttctganaganacatacagaactgtcatcttaagacctctcntggatctctttcagagatgcagtggntgagg

SEQ ID NO: 512 - DNA, 301 bp, Homo sapiens
  misc_feature 33: n = A,T,C or G
tgcagaattccccttcgagcggccgccgggcangtgaacgtgtgatcaccattatgcagaatccacgccagtacaagatcccagactggttcttgaacagacagaaggatgtaaaggatggaaaatacagccaggtcctagccaatggtctggacaacaagctccgtgaagacctggagcgactgaagaagattcgggcccatagagggctgcgtcacttctggggccttcgtgtccgaggccagcacaccaagaccactggccgccgtggccgcaccgtgggtgtgtccaagaagaaata

SEQ ID NO: 513 - DNA, 358 bp, Homo sapiens
  misc_feature 18, 47, 156, 254, 262, 315, 318, 330, 332, 338, 348, 354: n = A,T,C or G
aaaaaaggtgcgggccantgcaggggacactgaaggatttgaggcangaaaactccgcgataagagctgtctatatggccctgtggcagaagcacgggggacacgaccccatggaactgtgtccattaaacctctttgtcttcataaattacccantctcgggtatttctttattagcagcgtgagaacagactaatacagtaaattggtaatggtatagagtggggtgctgctataaggatacctcaaaatgnggaagcanattttgaactgggtaacaggcaaaggctggaacagtttggagggctcaaaaanaanacagggaagacntnggaaanttttggaacnttcttnaaaa

SEQ ID NO: 514 - DNA, 519 bp, Homo sapiens
  misc_feature 361, 399, 405, 413, 425, 427, 434, 446, 461, 477, 489, 499: n = A,T,C or G
aaataatttcttaatttatatgaaataaagacaacccatatagtagacttacaaatattctatttcgcattatattcaagactaaacatcttccaaaccatattcatgaaatggtttgatgatatgtgctttggcggttttcaagaaatatcaatcaaaccgtaattaaatttcaacgtatcggctaaacatccactgagcacctcctcttgcagttagcattagactaagtgcttaaggacaagtagtttgatgcaataaattaggaaatacatatttaagacttatattattcacagaattcttggcatagttatttaagttccttctgttgagaaccttgagggttggggtttctttnttcagtcccaaagctccgttttgagtctcccccttggngaattnaggtttgnaggccggcggangncctgtcncctttgccctgncaatggcctcggcgnaccctaggcaatcagnctgcgcgtctgngaccactcgnccactgcgatatgctgtgtt

SEQ ID NO: 515 - DNA, 393 bp, Homo sapiens
  misc_feature 361, 362, 367, 376: n = A,T,C or G
aaagatcaacttttattgtaacaaatataaagtcatcaatgttttacaaattgtcaaaaatgctttaagtacaaaaaatacattagtaaaatgaaagttatgttgtattatttggtatacacttaatactgccaacatgcataacacatgccagaaaagctcatgcattattggaagagaaaagaaatgtgatgtaactgctatattgtctgattataaattcattgcttcagtcagttttctttcttcagggataccatttacctgcaatgtgtaagaatgaatatgggcaggagttagtcagggcatggatacttttagattttgagccaagcaaattattgcaaggagaaaagttccnntttcntaattccanggaaaataatacattgc

SEQ ID NO: 516 - DNA, 396 bp, Homo sapiens
  misc_feature 370: n = A,T,C or G
ccagagtaagtcctgtaaacacagaattaaattaggggactcaagcaactattattatatttctcctttttgcagatacaggatcacttctgtatgtaacttttttacatacattcgatacattcagcagggactcgtgaaacagcaggatgttgatcagatgttttgggaggttatgcagttgagaaaagagatgtcattggcaaagctgggttatttcaaagaggaactctgatgctctgcgtgggaccatgcctgaactccccgaataactgaaaaatggctgaatatttttatggttacttgatatttatttccaaggagtgagcctaagacttttttccccttttgcaaattgctctaagaaagncccataattcttttacttcccgggcg

SEQ ID NO: 517 - DNA, 522 bp, Homo sapiens
  misc_feature 309, 340, 352, 358, 375, 390, 410, 413, 414, 438, 440, 444,452, 485, 491, 501, 514: n = A,T,C or G
aaataatccaggcaggagaagagaggagggcacacttggaactcccctccccacaatacgtgattatttacattttagtaattggacaatcccggctcaggaggaggttgcaagaatctgcaaaagttggagggagcgccccaggagaacaaacagcaagccttatttcccctagcccatcccccaaaaaaccatccatcccatcctagtgtctggtggtgtccggtggtgtccatcttccattccttcccaaattatggaagtaaggttcttctcaccagaataagagcacttgggataacagagtanggtcccctcacccaaaaaaaaaaaaaaaaanctttgggggaanaaaaangggttttccttcccccnaaaaaaaaaaaaatnggggtttgggggggggaaanccnntttccccccattttgggccccctngntttnggggaaanggggccccttttccaaaaaaaaaaaaacttttngggggnttttggggangggaaaacccccnttcccccc

SEQ ID NO: 518 - DNA, 431 bp, Homo sapiens
  misc_feature 361, 365, 399, 410, 415: n = A,T,C or G
aaagctaattagtacattttatatatcataaaaatatttttagtatattttcatgaaaatgctatagacttttgcctattgcccaacaaagtagctaataattcttatatttttgtttcagcctattcttcggaacagcactttagtagcttcttaaagttatattcaaagttgaaactgcagccataaatatttccaagagccacattcttccaaccagacagctaattactacagtcattatctgggcatatgtacccacagttgatgctttgctgttgctgctgctgctgctgccactgctagagacagactctgccagcaggctgaaagttctggattctaccccaaccacattatncagnataaaatcaatcttattaatttttcctgtctaanggggagtaagnctggngaagttggcccaacag

SEQ ID NO: 519 - DNA, 572 bp, Homo sapiens
  misc_feature 397, 424, 431, 446, 495, 497, 504, 510, 519, 526, 539, 551,558, 567: n = A,T,C or G
ctggagaccttcaaagctgtgcttgatggacttgatgtgctccttgcccaggaggttcgccccaggaggtggaaacttcaagtgctggatttacggaagaactctcatcaggacttctggactgtatggtctggaaacagggccagtctgtactcatttccagagccagaagcagctcagcccatgacaaagaagcgaaaagtagatggtttgagcacagaggcagagcagcccttcattccagtagaggtgctcgtagacctgttcctcaaggaaggtgcctgtgatgaattgttctcctacctcattgagaaagtgaagcgaaagaaaaatgtctacccctgtgcttgtaaagaaacttgaaaaattttgccattgccattgcaggatttcaaanaatgaatccttgaaaaatgggtgccanaacctgncccgggccgggccgnttcaaaggggcgaaatttccagcccacttgggccggcccgtttacttangngggaatncccaanctttgggtnacccaancctttgggccgtnaattcattgggncattaancttggtttnccctt

SEQ ID NO: 520 - DNA, 404 bp, Homo sapiens
  misc_feature 189, 271, 286, 300, 307, 311, 315, 363, 370, 373, 384, 400,403: n = A,T,C or G
gccctgggtatgattgggctctctcagcgcttgctgtccgtgttgtcctttggcaagagaggacggtcctaggattgcatcagtctggtggtctggtggagcgggtggggtgctggactgggtagagggcccagggttctgacctgggtggatgatgggtgaatggtcctgaactctctgctccctctntcagtgtctcttgggcttctatggagcttccctcttgtgctggaaacctcttttccatcttggaaatgcctctgcccacatntgggaagtgccatanccttgagtgaattnatttgtntatntatnaaatctttttcttctctcaggatacatcattcactttttggggacctnaaagaanctnattaactgatnaatttgtgaaactaanaant

SEQ ID NO: 521 - DNA, 555 bp, Homo sapiens
  misc_feature 344, 349, 351, 375, 385, 421, 432, 443, 449, 471, 497, 548: n = A,T,C or G
cctcaccaagtcttggctgtttctagctagctctataaacttttttcagcctctgttcattacccagttccaaagctgcttctacattttcagatatttgttatcagcaaaaaccccacctcttggtaccaattttcagtcttactctgttttctgatgcatatagcagaatacttgaaactgtataatatataggaatcaaaatgtatttcctacagttacaaaggctgggaagtccaaggtggagagggcacatctggcaaaagtcttcttgctagtggggactctccactttggcagaggtggcacagggaatcagatggtgagggggaagaacatgctanctcangnctgttttctcttcttataaagcancaattccttntccaatgataatccataattcattaacccattaatnttggaagcttnttattttcctnttaaanggccctacctctcaaaactggnattattgggggaataaagtttcaccntgagtttggaggggctgaacattcaaactatagcataacacacatgcttcncccttga

SEQ ID NO: 522 - DNA, 241 bp, Homo sapiens
aaaatcctgattttggagacttaaaaccaggttaatggctaagaatgggtaacatgactcttgttggattgttattttttgtttgcaatggggaatttataagaagcatcaagtctctttcttaccaaagtcttgttaggtggtttatagttcttttggctaacaaatcattttggaaataaagattttttactacaaaaaaaaaaaaaaaaaaaaaaaaaaaaaaaaaaaaaaaaaaaaa

SEQ ID NO: 523 - DNA, 428 bp, Homo sapiens
  misc_feature 343, 355, 360, 367, 411, 412, 425: n = A,T,C or G
ctttgggaaagttggtatgaagcattaccacttaaagaggaaccagagcttctgcccaactgtcaaccttgacaaattgtggactttggtcagtgaacagacacgggtgaatgctgctaaaaacaagactggggctgctcccatcattgatgtggtgcgatcgggctactacaaagttctgggaaagggaaagctcccaaagcagcctgtcatcgtgaaggccaaattcttcagcagaagagctgaggagaagattaagagtgttgggggggcctgtgtcctggtggcttgaagccacatggagggagtttcattaaatgcttactacttttaccttggccgngaacccccttanggcgnaattcancacctggcggccgttctaggggatccaacttcggaccaacttgnntaacatggcatantgt

SEQ ID NO: 524 - DNA, 656 bp, Homo sapiens
  misc_feature 387, 406, 411, 447, 517, 556, 569, 586, 588, 593, 609, 628,635, 639, 640, 648: n = A,T,C or G
aaaaagacacagtgggcaataagaatttgccctatgactcctgagaaaagggacatcctaaaatggaactactgaatccaaccatgtggttacaatatattaggaatcactctgtttcaactttaagattctattaatttattcttacaacaaataaccagtgggtttattctatgggctaggtattcatttagatgctaggggtacagtagtgaacaaaacagataagcagtcctgctcttgtgaatgcatctgacaatacatttgacaattcaaatctctctctctcgctctcatatcactgacctagtatttgaaacctgatgtaactaattaacagattaactattaggtacccttctgaatgatactctaagcacacatatnctattccagaaagaaaaanggtangaaaaaagtttttgggatagcttaaaatattcctcnccccaaatagcttggggtcttcaaacagaatttctggatcaccttcaatttcccgcttttattcaaaaanggcattgtggtttaacttttttaacctttggggccgggnaaccccccttaanggggcgaaatttcccancnccacnttgggggggccggttnccttagtggggaatccccnaactttngggnnccccaaanctttgggc

SEQ ID NO: 525 - DNA, 360 bp, Homo sapiens
  misc_feature 306, 307, 313, 316, 317, 329, 335, 343: n = A,T,C or G
attctctgtacgcccagggaaagcggcgttatgacaggaagcagagtggctatggtgggcaaactaagccgattttccggaaaaaggctaaaactacaaagaagattgtgctaaggcttgagtgcgttgagcccaactgcagatctaagagaatgctggctattaaaagatgcaagcattttgaactgggaggagataagaagagaaagggccaagtgatccagttctaagtgtcatcttttattatgaagacaataaaatcttgagtttatgttcagaaaaaaaaaaaaaaaaaaaaaaaaaaanntttttnccnncccgggggggcntttaanggggaaantccccccccctgggggg

SEQ ID NO: 526 - DNA, 53 bp, Homo sapiens
  misc_feature 39: n = A,T,C or G
tattacaattcactggccgtcgttttacaacgtcgtggnacctaactggctct

SEQ ID NO: 527 - DNA, 554 bp, Homo sapiens
  misc_feature 331, 342, 344, 365, 369, 380, 385, 419, 420, 424, 453, 474,483, 495, 512, 513, 529, 532, 533, 539, 544: n = A,T,C or G
cctctgaggaagggacaaaggagctgggaccggactggctctctccgagctttgagaccaagtctcctgcacagaaggcccagcaaaggcaaagactaggaggcagcagcaccctgtgtcatccagaagtgcaggggacaaggtgtgggacgccagatggaagtgggagaggatggaagtgtgaagaccggaaaggccatcccctcctaaaactccatggacacaacaatctgaatgtgcgaacttcaggcagttctaactttgtcccagccaaaccagtcccggaacaaaacacacaatgccttgagatggaaaagactgaaacccctanaatgacttatntncgtaattttattcttcccccnactngggcttcttgnggaanaaaaaattttgcttggaaaagaaagcttaaaacnnattnccttgagggttttttacccttcggcccgngaaccaccctttaaggggcgnaatttccanccccacttgggngggccggtttccttagnngggattccgaaacttnggnncccaanccttnggcggtaaat

SEQ ID NO: 528 - DNA, 536 bp, Homo sapiens
  misc_feature 339, 415, 431, 470, 476, 488, 492, 512, 518, 520, 526: n = A,T,C or G
ctgagatacccctgctgctgtgtcaaggaaagggctttatttgtgaattttgccagaatacgactgtcatcttcccatttcagacagcaacatgtagaagatgttcagcgtgcagggcttgctttcacaaacagtgcttccagtcctccgagtgcccccggtgtgcgaggatcacagcgaggagaaaacttctggaaagtgtggcctctgcagcaacatgatgcccctgagtactgtgaaaaagactgttcaacatgccttatgataacaccgatttgtgtctattattggtgacattgttttagatattgggtattgtatattaaggaaaaagatggnctatattctctttattggatatacttaatggttcaaaagaatgcaaaatcttgggtttaaccccagggctgatagntgggggttttggttancaaatgttctggtttgggtgctattgggtttttaacttnggccgngaaccccctaanggcnaaattccaacacacttggcnggccgntncttagngggaatccca

SEQ ID NO: 529 - DNA, 768 bp, Homo sapiens
  misc_feature 345, 366, 396, 416, 417, 446, 461, 473, 535, 538, 539, 556,559, 574, 585, 601, 603, 619, 627, 634, 640, 647, 670, 681,695, 697, 702, 707, 709, 712, 717, 728, 733, 738, 752, 757,758: n = A,T,C or G
aaaaatataacacagtcaatataaacatgtactgggaattataaaccattctttcttctaagcactggatgagatactaaaaacatacagtatcttaccaatagccattaaaataggctaaaatgaaaaagaaaccgttgtaacaaggttactaatcccccaactttcaatgctgagttccttcatcatccatgtgcaatccagagatgacatctagcagggtggtaaaattattctggaaaatgccaactgtacttagacaaaataagttaattctatatggttgtccattaaagttttatgtggctatggttccactggagctaaaaattggcttttaactgnttcccaaatcaagaactagcngaaggagaagaaagtaaattaaagccaatnggcacttccctttcagaagnntcaaaaatgggttagaaattttgatgcanaatttaacccttaancggaagtttcangtcagtccattttaagaatgaatccctggtaggggttcattaccaaaataccaccttgaaanccnnttggggtttaaacttcnttntttccctttcccttnaaaaggttttnttggattaaaaggaanancttctttcccttgttntttggggnaggggancttggncattaangttcaaaaatttgcctcaaaaangggttgggaanggaccctttaaggncnagccngaaantnatnaaccnactttttttanccccnggctnacactaaaactggntgtannctggaaccct

SEQ ID NO: 530 - DNA, 745 bp, Homo sapiens
  misc_feature 400, 402, 430, 451, 500, 509, 524, 541, 563, 572, 603, 611,626, 634, 668, 723, 728, 732, 738: n = A,T,C or G
aaactccactgctgaccctgagtgcattcgctatcccctcacctattttgttttgggacaaagtctcgctctgtcacccaggctggagtgcagtggggcactctcagctcactgtaacctccacctcctgggttcaagcgattctcatgcctcagcctgccaaatagctgggattacaggcacatgccacaaagcccggctaatttttatattttttagtagagatggggtttcaccatgtcggccagcctggtctggaactcctggcatcaagtgatctacctgccttggcctcccaaagtgttgggattacaggtgtgagccaccacgccccgggccaaagccaaaaggtcttggaaagggggacttcattcccatcattgaagggtcctaccctttntngaaccttattcttaaactttccccttanccaaaagggcccccatttttnaaaatccaatccacaatttgaaggggttaaaggggttccaaccacatgnaaatttttnggggggggaaaacangtccccattcttttaancccaaatggggcaaattttggngcctttggnaacccccacttcttgggtcaaccttttaaangggggganttgggcctttttgtngccaaatngaacagggttttttccacatggtggggccttttnaaaaaaaattcccttttgtgttgaaaccaaaaaccttgccccgggggggggcccnttttnaaanggggcnaaaattt

SEQ ID NO: 531 - DNA, 384 bp, Homo sapiens
  misc_feature 39, 375: n = A,T,C or G
ccagcttcgagaaagagttgagaagttaaacatgctcancattgatcatctcacagaccacaagtcacagcgccttgcacgtctagttctgggatgcatcaccatggcatatgtgtggggcaaaggtcatggagatgtccgtaaggtcttgccaagaaatattgctgttccttactgccaactctccaagaaactggaactgcctcctattttggtttatgcagactgtgtcttggcaaactggaagaaaaaggatcctaataagcccctgacttatgagaacatggacgttttgttctcatttcgtgatggagactgcagtaaaggattcttcctggtctctctattggtggaaatagcaaaacttgcccggcnggccgttcg

SEQ ID NO: 532 - DNA, 589 bp, Homo sapiens
  misc_feature 362, 394, 408, 441, 446, 450, 510, 522, 530, 537, 545, 546,567, 580, 582: n = A,T,C or G
ctgctgcttgtgctgccatgtccgcaccggcaccatcctgctcggcgtctggtatctgatcatcaatgctgtggtactgttgattttattgagtgccctggctgatccggatcagtataacttttcaagttctgaactgggaggtgactttgagttcatggatgatgccaacatgtgcattgccattgcgatttctcttctcatgatcctgatatgtgctatggctacttacggagcgtacaagcaacgcgcagcctggatcatcccattcttctgttaccagatctttgactttgccctgaacatgttggttgcaatcactgtgcttatttatccaaactccattcaggaatacataccgnaactggcttcctaattttcctacaaaagaatnatgtcattgtaagngaatcctaccttggttggggcccctaattaatncttcntggntaattaacattaatctttgacttttaaaggggttaacttggaataagccttggggttttnggaaactgcttncccgaaanccattcnaatggggnngggaaacttcctttggatggnccctggggtttantnttaaccc

SEQ ID NO: 533 - DNA, 502 bp, Homo sapiens
  misc_feature 373, 374, 382, 385, 398, 404, 408, 413, 416, 419, 423, 444,456, 468, 483, 489, 493, 494: n = A,T,C or G
ctgccgatgtagcctcggtaggtggctattagagctctaccatatacagtggtgcatcttcaaatttatgcatcaaactaaagacatgtccaagtccattttaatttcctcagtggttttatgagaagttttatgggcctcccccaattgtctttttattttgggttatgacgatcatgtttgataattacaatgatagtctctttccacgtgatgcttttgtttgaacctgataaaatttagtgaaactttgtaatgatctatgtgcacttttacttgtaaaatggaatttctgtatgtttatacttgtaaatatgattgttgttagtgctcctgttgctcatggtgtcctgcctcgcatttggtgaatctnnttaatgancangtattcttaactnatttcntaantgggngtnggnaatnaggggaaaatgggggcaaggnggggggggtaantttggccccccntgaaattctccattnaaattngggnntctttccc

SEQ ID NO: 534 - DNA, 245 bp, Homo sapiens
aaattaaaaataattattaaaaaaaggaaaactttaaggaattcacaatcaattgcctgactcattttgatgtcatgtacagcatatggaggtcaggaaggctatttgcagcacatgtgattaggggctactgatcttcagggtttagctttcttccaaacagtgtaaaatacccacaattccaagtatgaagggacacagacgatctcctttgaaaattccacaggacaatacaggcgccccag

SEQ ID NO: 535 - DNA, 438 bp, Homo sapiens
  misc_feature 345, 346, 361, 385, 391, 394, 396, 409, 428: n = A,T,C or G
cgagacagttactcaagcagccgaagtgatctctactcaagtggtcgtgatcgggttggcagacaagaaagagggcttcccccttctatggaaagggggtaccctcctccacgtgattcctacagcagttcaagccgcggagcaccaagaggtggtggccgtggaggaagccgatctgatagagggggaggcagaagcagatactagaaacaaacaaaactttggaccaaaatcccagttcaaagaaacaaaaaaaagagtggaaactattctatcataactacccaaggactactaaaaggaaaaattgtgttaccttttttacctgcccggggcgggccgctnnagggcgaatttcagncactggcggccgtactaagtggantccaanctngngcccaagctttgncgtaatcatggcatagttnttctgtgacc

SEQ ID NO: 536 - DNA, 609 bp, Homo sapiens
  misc_feature 354, 362, 368, 376, 377, 387, 400, 402, 412, 418, 421, 424,444, 454, 470, 472, 508, 511, 528, 529, 536, 543, 549, 557,576, 583, 600, 601: n = A,T,C or G
gagagcgagctgagtggttgtgtggtcgcgtctcggaaaccggtagcgcttgcagcatggctgaccaactgactgaagagcagattgcagaattcaaagaagctttttcactatttgacaaagatggtgatggaactataacaacaaaggaattgggaactgtaatgagatctcttgggcagaatcccacagaagcagagttacaggacatgattaatgaagtagatgctgatggtaatggcacaattgacttccctgaatttctgacaatgatggcaagaaaaatgaaagacactgacagtgaagaagaaattagagaagcattccctgtgtttgataaaggatggcaatggntattttantgcttnaaaacttnnccttgtgatnacaaaccttggananaagttaccanatgaanaanttnataaaatgatcagggaaccnatttgatggngatgggcaagtaactntnaaaagttttcaaatgatacagcaaatgaaacctttncanaatgtgttaaattcttnncaaattntttattncctttnttttttgnactttttttaaaggttttncttctgnaaaaaaattgctttttnnaattagga

SEQ ID NO: 537 - DNA, 544 bp, Homo sapiens
  misc_feature 328, 357, 364, 394, 404, 405, 407, 418, 427, 433, 436, 443,449, 466, 470, 471, 485, 490, 515, 516, 524, 529: n = A,T,C or G
ctcaaatgtataaaccattaagtagtcaaatggctacagtgaaaaacagtattttatagtaggtatagataattggcacagataagctcagaaaagaatgatcagttcttgctggagtaattctagggaaatggctttcatggagaaaaggaaaagaggaagtgtagtatcagtctatgttgtctattgctaatgtggaatggtgttttctgcttctacgccttactgattccagtttttatatttagaaaacaaattaagtgaagcttctggaggtagggctgaaaatggtgaaagaagtgacttggaagaggacaacgaaaagganggaaccggaaatggaaccattgatgctgntcctgtngatgaaaatcttttcactggaaaaggattnggatgacctnnanaaagaattaantccccttgnttttanaanaatgacnccaacncaccttgaaaaattaanttannttcaccccaagttnaaatngcctccattaatttctttccccctnnaatcaccnggatntttatttcctatgct

SEQ ID NO: 538 - DNA, 279 bp, Homo sapiens
  misc_feature 264: n = A,T,C or G
aaaatcctgattttggagacttaaaaccaggttaatggctaagaatgggtaacatgactcttgttggattgttattttttgtttgcaatggggaatttataagaagcatcaagtctctttcttaccaaagtcttgttaggtggtttatagttcttttggctaacaaatcattttggaaataaagattttttactacaaaaaaaaaaaaaaaaaaaaaaaaaaaaaaaaaaaaaaaaaaaaaaaaaaaaaaaaaaaaaaaaaaanaaaaaaaaaaaaaaa

SEQ ID NO: 539 - DNA, 555 bp, Homo sapiens
  misc_feature 15, 313, 334, 340, 351, 354, 365, 371, 394, 432, 440, 453,458, 464, 468, 470, 479, 482, 494, 495, 511, 512, 516, 525,532, 534, 547: n = A,T,C or G
ccgcctgctactgantaaggggcattcctgttacagaccaaggagaactggagaaagaaagagaaaatcagttcgtggttgcattgtggatgcaaatctgagcgttctcaacttggttattgtaaaaaaaggagagaaggatattcctggactgactgatactacagtgcctcgccgcctgggccccaaaagagctagcagaatccgcaaacttttcaatctctctaaagaagatgatgtccgccagtatgttgtaagaaagcccttaaataaagaaggtaagaaacctaggaccaaagcacccaagattcancgtcttgttactccacgtgtnctgcancacaaaccggnggngttttgttttnaaaaancagcgtcccaagaaaaaataaanaaaaagcttgcaaaatattcttaactttttggaccttngggccgcnaaccacccttaangggcnaaattnccancncacttgggnggnccgtttacttanngggaatcccaaacttnnggtnccccaaacntttgggngnaaaatcattgggncatttaac

SEQ ID NO: 540 - DNA, 678 bp, Homo sapiens
  misc_feature 337, 340, 399, 447, 470, 478, 483, 486, 495, 497, 525, 547,548, 568, 602, 613, 623, 652, 658, 661, 669: n = A,T,C or G
ctgattaatcattgttgatgactgcagtttttcccatccttcccgatttacatctgttcaggccaattcaaatatggtgagtaaatgaattagacatgcaaattcaagccccaggctagaaagagggagagagaggaaaagagagagaaagagagagagcgcgcgcatggctgaaatcctaggcgagaagaaagattcttctgcctgatagttattttaatgctctaaaaatcctgcaaatcagaccttcctgtcccttgcaggataactgtaaggctttttaatgtaaggaggcttctggaggaagtgaagagctatggaaacacacacatagtgnggnaaaatttcacattttttaaaaattttttaaaaaccaccgaatatggatacagtttatanctttacatattccttttggcccttaaggcttatttagtttttagcatngtccccaaatggcttcagtgggntttcctgnttttnaanggccctttnanaaataggggagctccttgggcccgaatnaatccaaaatggaactccccgnnttgccaaaaaacttgatttnaaatagtccccttggggaaaagcatttcccttanctcctgacttnaatgccctanttggcccccttgggcggaaccctttaggnaattcnccnctgggggntttttgggg

SEQ ID NO: 541 - DNA, 345 bp, Homo sapiens
  misc_feature 335: n = A,T,C or G
ccagagaagcaagtgtactgatatccaagagcaggagaaaatagatgtcccagaacaagcagagaggctgattttgtccttcctctgcctttttgtttcatatggggcactgaatggactgatgcccatccacattattgagggtggatcttctgtactcagtctaccagtagaaatgtcaatgacttccagaaacaccctcaccaacacacgtggaaataatgttttaccaggtatctgggcatcccttggttcactcaagttgacacaaaattaaccatcacagaaggagactggccttactctgaaattaggaaactaaagaaagtgaccanaatggaaact

SEQ ID NO: 542 - DNA, 514 bp, Homo sapiens
  misc_feature 337, 343, 367, 379, 382, 391, 395, 410, 420, 448, 451, 460,461, 471, 475, 479, 491, 494, 495: n = A,T,C or G
aaaactcgtttcagacagtttgtctgaacatgagaagaacaagaacaaagagggagatgataagaaagagggaggtaaagacagagctttgaaaggagttttgcgagtgggagtattggcaaaaggattacttctccgaggagatagaaatgtcaaccttgttttgctgtgctcagagaaaccttcaaagacattattaagccgtattgcagaaaacctacccaaacagcttgctgttataagccctgagaagtatgacataaaatgtgctgtatctgaagcggcaataattttgaattcatgtgtggaacccaaaatgcaagtcactattacactngacatnttccatttttccaaaaaaaaaccntgagggaagganatntaacccttnggtnttggtgaaagacccnccggaccttnttggacaggcaaaaaatgcccttgaccnttnttggcttgnnttttcccccncccntaantgggttccaggnttnnaacttaaatgggcttgcca

SEQ ID NO: 543 - DNA, 590 bp, Homo sapiens
  misc_feature 346, 362, 370, 388, 408, 455, 464, 472, 484, 492, 493, 501,510, 515, 521, 524, 527, 538, 550, 560, 567, 579, 582: n = A,T,C or G
aaagtttgtgcctgtaatacagtccgtgatatactggaaggcagaacaattagtgttcaatttaaccagctatttcttagaccaaataaagagaaaatagactttcttcttgaggtatgttcaagatcagtaaatttagaaaaagcttcagagtctttgaaaggaaacatggctgcttttctaaagaatgtgtgtctggggttggaagatctgcagtatgttttcatgatttcttcacatgagcttttcattacattgttgaaagatgaagaacgaaagctacttgttgatcagatgaggaagagatcccctagagtaaatctgtgcattaaacctgttactttantttatgatatcccacnttagcaantgtcaacattggcagttngagcatcaacttatattggncagtggatccttggaggattagaccaaatttaattgaatacatgggntgactttanaacccccntctggaccgggnttaataanngggaaatncctttttgnttttngggggntanccngggaattaaanaaatttaacaanaaaatttggnttttttnttttggaccttnccnggggggcc

SEQ ID NO: 544 - DNA, 552 bp, Homo sapiens
  misc_feature 329, 359, 361, 363, 405, 440, 443, 447, 459, 461, 465, 469,472, 486, 487, 489, 499, 512, 516, 530, 532: n = A,T,C or G
aaatttctccctttgtgtgagtatgactatagttctggcctggtgttttctatttatttagttttagatgtcagcattttactatacttggtcctctcacttcagaataacagggctatttattgatacaaaggagaggtgttcagatcatcttgttaagatgcagagctcaaaataaacactaaatctttatttggagatccacatccttcctcaaaggaaggctcatgagtaaatttgtatgcagtataaagcccaagtagagggtgtatttttaatgactactttgcttacattttagattgtgcaaatgtctcaatcaatgcttncaggaatgtggaccttcctcagttttagcnananaacccttgaccaataaaatactgttgcatgctttccaataanctgagggattgggatagaaatgcttatctacccgnttntganggagaaaacaanancagnggcntgnaaaattttccaacnnanaatcgtaatngggttcaaatgancccngtaaaaccattttntncccttaggggggaaaacccc

SEQ ID NO: 545 - DNA, 585 bp, Homo sapiens
  misc_feature 340, 343, 354, 363, 368, 376, 383, 405, 407, 414, 417, 460,462, 474, 477, 488, 511, 519, 535, 554, 557, 559, 566, 568,577: n = A,T,C or G
ggcggctaccagtgtaaagccagagctgaggttcttgatagtccacaatgggtgaaccacagcaagtgagtgcacttccaccacctccaatgcaatatatcaaggaatatacggatgaaaatattcaagaaggcttagctcccaagcctccccctccaataaaagacagttacatgatgtttggcaatcagttccaatgtgatgatcttatcatccgccctttggaaagtcagggcatcgaacggcttcatcctatgcagtttgatcacaagaaagaactgagaaaacttaatatgtctatccttattaatttcttggaccttttagatattttaataangancccttggagtnttaaaccanaaganaaactttnaagaatnttaagcttcttttttgtccccntncttcttnttntaaatgaattcccgaccccaccaagcaagaaaaaaaccttganantcatgattgganggnccaaaaacctncaacgggtttgaaacagaacttngggccgcnaccacccttaagggcnaaattccacacccctgggnggncnttacttngnggggatccnaactttgg

SEQ ID NO: 546 - DNA, 563 bp, Homo sapiens
  misc_feature 350, 378, 386, 392, 444, 494, 514, 515, 533, 555: n = A,T,C or G
aaaaagcaatttagattttacgtgaattagacgggtgtgtcttactcccatccagataaaatatgggcagggaagcctggactcctggagatgttcctgcaggaagtccatgggcacctgagtagttggaatgggaagggagagtttgacccgagacagagcatgagctcctcccaggaacaaaggctttatgaaaatatcctgcttcccatccctgggagagggtcagggtgggcggaagggtcaggagaaagaaagatcatcaaagaagaaagtcaaccaaaaactggaaaagagcggacccatcccattgtttccactgaattcatgtcatgagaacaagacttctnggggcccattttcctgtttctcttgccnttttcttnatgaanaatcttgtcttggacttatgggccctgtaacagttttggacagtcaagggcnccaggctatcaaacctcggccgcgacccccttaagggcgaatttccaccnccttggcgggccgtacttannggaatcccaacttcggtncccaacgttgggcgtaatcatnggcaatag

SEQ ID NO: 547 - DNA, 337 bp, Homo sapiens
  misc_feature 15, 310, 328: n = A,T,C or G
aaatatcacaagtangtcttaagtgtcatctggcatcttctttctgtagccaggtaactcttagatcttattcatcagcctgctgaacagttcctttttcagagacatagataccatccaaaaatttcctgatatccttgtttttaactgttgtggcttgctgaatcaaagccgctgaatttgaaacaagctcaatgtcatttccttcaaggattaattcatctttctgggcttgagatactgaacaagcaacacctggtctcatccgaaccctgcggatatatttttcacccaagaaatttcggatttnaacaagagacccattctnctggataac

SEQ ID NO: 548 - DNA, 390 bp, Homo sapiens
cctttacagaaacatttttagtaatgaggatgagaactttttcaaatagcaaatatatattggcttaaagcatgaggctgtcttcagaaaagtgatgtggacataggaggcaatgtgtgagacttgggggttcaatattttatatagaagagttaataagcacatggtttacatttactcagctactatatatgcagtgtggtgcacattttcacagaattctggcttcattaagatcattatttttgctgcgtagcttacagacttagcatattagttttttctactcctacaagtgtaaattgaaaaatctttatattaaaaaagtaaactgttatgaagctgctatgtctaataatctttgctttccaaagggttggggtttggtgg

SEQ ID NO: 549 - DNA, 380 bp, Homo sapiens
  misc_feature 310, 322, 323, 325, 338, 346, 348, 351, 358, 360, 373: n = A,T,C or G
ctgccgatgtagcctcggtaggtggctattagagctctaccatatacagtggtgcatcttcaaatttatgcatcaaactaaagacatgtccaagtccattttaatttcctcagtggttttatgagaagttttatgggcctcccccaattgtctttttattttgggttatgacgatcatgtttgataattacaatgatagtctctttccacgtgatgcttttgtttgaacctgataaaatttagtgaaactttgtaatgatctatgtgcacttttacttgtaaaatggaatttctgtatgtttatacttgnaaatatgattgnngntagtgcttcctgntgcttatngnggnccggccncnccttttgtgaatnctggtaa

SEQ ID NO: 550 - DNA, 313 bp, Homo sapiens
  misc_feature 244: n = A,T,C or G
aaaaaggtatttttttcctaattataaaactgatgtgtcagttacggaaaaattagaaatgcagcacaaatacatgaatattttaccacgaaattgccatataatatcttgtcttttttgggggtgtgaattttttgcattgttctgatcatattctttatcatgtaatttatgttcttttttactaagtattatgtgtggttattatagattttcacaaagatatattgctggtaatatattntattgtgtagtcttataatttacttaaccttctttcaattgttagaaatttaggctatttccagatttt

SEQ ID NO: 551 - DNA, 332 bp, Homo sapiens
ctgaggttgtcagtacaatgaaaccaaactggcgggatggaagcagattattctgccatttttccaggtctttgagttgcacgtcaaatctggggctgatcaccccacacttgtttagcctgcctgtgaggttcacaacaattttcccagctctgtggtcatcaatgatttcaaattcgctaatgtaaccatgcttcatcatcacagtgagaaaccggacgatgactttggagcacggcctaataagcacctggcgtttgcctctcttttcggcattgttgatactcttgagagcatctgccaggacattcatgcgcaccattgtggcggcg

SEQ ID NO: 552 - DNA, 586 bp, Homo sapiens
  misc_feature 355, 395, 451, 461, 476, 487, 493, 498, 510, 514, 515, 527,532, 541, 542, 552, 575, 578: n = A,T,C or G
aaatgcaagacaacttatgaggccacttgaagaccaacctttacccatgacatctggtaacttttcttctttgagatggggtcacccaggctggaatacagtggggcagtcagctcactgcagcctcgactgcctgatatcaaggcagcctcccaaatagctgggactacagatgtgtatcaccaagcccaactaatttttctattttttgttgacaggctctcactatgttgcccaggctcgtctcaaattcctggacttgggatccatctgcctcagcctcccaaagtgctgggattacaggcgtgagccactgtgcctggccctggtaacttttaatgttcctttgaagggntttcctagtatgaggatgggcaagcttactgagtctgtgngtgtcatgcttaccaccaaaacggtttcacaaagctgaaaccacttaccaaaattngttccttganaccaaaaatgaatgntcacaggagcncactgnttgantgatctttactnttcnngggaatttactngccgncccctaggnnatcaccatgnggcgtctatgaccactcggccantgngaaatgga

SEQ ID NO: 553 - DNA, 368 bp, Homo sapiens
tttttttgaggaattaacagtctttattgggctcagaccaggagtccgtgggtcttgaggacctctgtgtatttgtcaattttcttctccacgttcttctcggcctgtttccgtagcctcatgagctgtttcttcttccggtagtggatcttggctttctctttcctcttctcctccagggtggctgtcactgcctggtacttccagccaacctcgtgagccaggcgccccagataggcaaactttcttgtaggcttcagacgcacgaccttgagggcagcaggaaccaccatccgctttttcttgtcgtagggcggtgggatgccgtcaaacaccttgagacggtccagagcggcacctgccgggcg

SEQ ID NO: 554 - DNA, 129 bp, Homo sapiens
cagtttgcctggagacatttctactggtaccttaccaatgagggtatccagtatctccgtgattaccttcatctgcccccggagattgtgcctgccaccctacgccgtagccgtccagagactggcagg

SEQ ID NO: 555 - DNA, 582 bp, Homo sapiens
  misc_feature 396, 444, 453, 473, 496, 503, 509, 514, 520, 531, 538, 556,557, 567, 568, 571, 577: n = A,T,C or G
ccagtccaagctggaggaggccacaatgattcattagagctttgaggttgttcttgaagagctgaatataggacatgagctgtcccggtgtgactctccccatactcatcttgattggcaggttttctctgcttgccgcttccactagatgtctccgaacttccatcactgcctctttgtgcttagtgttcagtaaagcttcccatagggctttggctgtggtgtcactggattgtgaaagacagcctggtgcaaccacattataattttcctcctcagtatggagtgcagtgagcgctatcatgttaaccatcacatcatttgtgtggcctgggagctggggaagtgctgaaatgatcttctctactaagttgtctccatgatgtccaactgctnctgtgaaaatccaggggtctgttcacaaaaaaccacttgatgccctgnctgcagcangcttctttcttttctttgcnggggcataattggacctcggccncgaaccnccttanggggnaattcnacaccattggngggcgtncttatggatccaacttgnnccaacttggnnaanatgggntactg

SEQ ID NO: 556 - DNA, 359 bp, Homo sapiens
  misc_feature 198, 269, 283, 312, 345: n = A,T,C or G
cctgaaggaagagctggcctacctgaagaagaaccatgaggaggaaatcagtacgctgaggggccaagtgggaggccaggtcagtgtggaggtggattccgctccgggcaccgatctcccaagatcctgagtgacatgcgaagccaatatgaggtcatggccgagcagaaccggaaggatctgaagcctggtcaccanccggactgaagaattgaaccgggaggtcgcttggacctcggccgcgaccacgcttaagggcgaaattccancacacttggccggnccgttcttagtgggattcccaacctcggnaccaaagctttggcgtaaatcattgggcattancttttttccctgtg

SEQ ID NO: 557 - DNA, 256 bp, Homo sapiens
ctgtccagtgacatctagggaagcccagcccccagcagcagcaggaactcttggggacagtctgtcttgttgcaaagccagcacagcaagcagcctccgcattagttccatagcttgactggcttctaagatgggcatgtcaagatccagaatctcaaagcatcccctctttggctccatcatccaagggtgagaaacagcagagcctaagtgagagtctgagtcaacaccttggctcagttttcaaatgaatttt

SEQ ID NO: 558 - DNA, 591 bp, Homo sapiens
  misc_feature 439, 447, 457, 460, 493, 497, 509, 515, 521, 531, 534, 546,548, 555, 575, 581: n = A,T,C or G
ggaaaaaaaattagaggatgaagccaaaactaacacattctaaagaattgcaaggaaagcaactatgtaattctgttgaaaaaggaaagctcaggaaatactctttttatttcttttgattctagctgtctgcgagcctggctgtggtgcacatggaacctgccatgaacccaacaaatgccaatgtcaagaaggttggcatggaagacactgcaataaaaggtacgaagccagcctcatacatgccctgaggccagcaggcgcccagctcaggcagcacacgccttcacttaaaaaggccgaggagcggcgggatccacctgaatccaattacatctggtgaactccgacatctgaaacgttttaagttacaccaagttcatagcctttgttaacctttcatgtgttgaatgttcaaataatggtcattacacttaanaatctggnctgaattttntancttcttataaaatacttgaccgatattacctcntccntttaagtttctnaatccntctgtncctgaagggntanaatttttggttnanggctttngggacaaatttttttttgcnatggtnggtaaaattt

SEQ ID NO: 559 - DNA, 650 bp, Homo sapiens
  misc_feature 429, 440, 441, 448, 471, 474, 486, 510, 519, 520, 528, 539,555, 566, 581, 596, 625, 628: n = A,T,C or G
aaaaaataaaattataaacaaaatacagaaaaatattgacacctgtgataacaaggaaatgactcttaagggcagtttgttgtcctgggggaaaaaatcataagtgttataaagaaatattattgtgcaaaggaggaatgtaatatttaaggttcatttacaacgggcatttggcgtcgacagaaaaagtctttctatgtatacattcaacattttgcagcatatttacattcaagttacatttccaaattctatgccaaatacagtctaactcaccatcaacaatccctcagatattactaaaatcctgtttatttggtaggagtgcaatattatcttattaggaaataattttatgttcctactaagtcaactgcatttttactactttaacaaaattcactgacatttttatccccgttgaagtcnaacctcttttnnaccaaantcaatacttactcaatggtgccngtnttaaaatatatnataatccttttcctccctcctttnaaaaaccgnntttcaacnttcaatgaaanggcccccccttttganaaatttttttntttttccagaaattnggatggtttacaaanaccaatttcccaaattttacttgttttcnaanaaaggtggaacccttttccttt

SEQ ID NO: 560 - DNA, 482 bp, Homo sapiens
  misc_feature 433: n = A,T,C or G
aaaagatgtagataaaattttattaataacagaagacttaaaaaacattggaaatacttttttcaaatcccagaactgggagatggctattaaaaaatatgcagaagttttaagatacgtggacagttcaaaggctgttattgagacagcagatagagccaagctgcaacctatagctttaagctgtgtactgaatattggtgcttgtaaactgaagatgtcaaattggcagggagcaattgacagttgtttagaggctcttgaaatagacccatcaaataccaaagcattgtacccgcagagctcaaggatggcaaggattaaaagaatatgatcaagcattggctgatcttaagaaagctcaggggatagcacccagaagataaactatccaggcagaattgcttgaaagtcaaacaaaagataaggcccngaaagataaagagaaggcgtttttccaaaatggtttgcttaaaaaggat

SEQ ID NO: 561 - DNA, 562 bp, Homo sapiens
  misc_feature 434, 448, 449, 467, 471, 477, 481, 486, 497, 511, 514, 534,536, 554: n = A,T,C or G
aaagcctgatctggtgtgaataatcaactaggaaatctaaacttggataacacgtggtgaacaactgcctttagctggtccagattaatcatttcaaagacatccattttagatcacaagcaggaagtcgatagtctcaaaggcactttgtttctcccaagtaggccaccaggcagcctctagagttgctttacccaaatccttctccagccatgacttggtgactctaagcttgctcccacctgccccctccacttccctcagatgatgaggagccagggctaagggggcagccttctctcttcccagtgatgcacatccttcacattggctgctttgttctggaatatggatatctcaacctggatgcccgaggaagctgctggatgcttaatggtgctagaagctcaagtgtgtttgaaaccaaaacccanttgtcccccatgcnnaaagaaatcctgtgtgancctnttggtnttanaaaanaaatctggccntttttttaacattnacntttttgccttttagggaaananaccggggaacaaaaaatnaattttgg

SEQ ID NO: 562 - DNA, 323 bp, Homo sapiens
  misc_feature 182, 210, 266, 294, 296, 299: n = A,T,C or G
aaatgacaccaccaagcctgtgggccttctcctaagtgaaagattcattaatgtccctccacagatcgctctgcccatgtaccagcagcttcagaaagaactggcgggggcacacagaaccagtaagccatgtgggaagtgctacttttaccttctgattagtaagacatttgtggaagcangaaaaaacaattccaaaaagaaacctancaacaaaaagaaagctgcgttaatgtttgcaaatgcagaggaagaatttttctatnaggagcagggaaaacctgaagtgcttgnangtncataccaaggaagaggattggaat

SEQ ID NO: 563 - DNA, 391 bp, Homo sapiens
  misc_feature 97, 174, 352, 355, 356, 362, 383: n = A,T,C or G
ctgcccaagggcgttcgtaacgggaatgccgaagcgtgggaaaaagggagcggtggcggaagacggggatgagctcaggacagagccagaggccaanaaagagtaagacggccgcaaagaaaaatgacaaagaggcagcaggagagggcccagccctgtatgaggaccccccanatcagaaaacctcacccagtggcaaacctgccacactcaagatctgctcttggaatgtggatgggcttcgagcctggattaagaagaaaggattagattgggtaaaggaagaagccccaaatatactgtgccttcaagagaccaaatgttcagagaacaaaactaccagaccttcggncgnnaccacncttaaggggcgaattccaacncacttggc

SEQ ID NO: 564 - DNA, 554 bp, Homo sapiens
  misc_feature 341, 414, 425, 427, 443, 456, 480, 486, 487, 491, 545: n = A,T,C or G
cgacaaacaaggtttccccatgaagcagggtgtcttgacccatggccgtgtccgcctgctactgagtaaggggcattcctgttacagaccaaggagaactggagaaagaaagagaaaatcagttcgtggttgcattgtggatgcaaatctgagcattctcaacttggttattgtaaaaaaaggagagaaggatattcctggactgactgatactacagtgcctcgccgcctgggccccaaaagagctagcagaatccgcaacttttcaatctctctaaagaagatgatgtccgccagtatgttgtaagaaagcccttaaataaagaaggtaagaaacctangaccaaagcacccaagattcagcgtctttgttctccacgtgtccttgcagcacaaacggcggcgtatttgttntgaaaaaccancntcccagaaaaataaanaaaaaggttgcanaaaatgcttaacttttggaccttnggccgnnaccnccctaagggcgaattccacccccttggcggccgtcctttgggatccaacttggnccaacttgg

SEQ ID NO: 565 - DNA, 489 bp, Homo sapiens
  misc_feature 385, 391, 411, 425, 429, 435, 440, 466, 468, 483: n = A,T,C or G
ctgtgtgacataggacatcttctttctctgtctcacttgaataatatgatgtgtcagaggagacatgattgtaattgcctaaagcaattcttgtgatcaagaatcagaagcatgaacagtattgccctctgtgttagcccctttataagggaggatatcatcttcagcatgctgaattgtcatctttcttagcagtgcaaatgactaaaacttagccaatgtagagtttgtccaaatttggagctcataactcagttcttgagcaaagtgaaaagaaaacattgtgattatggggaaaatatttgatgggacttatcaaataaagataggaaaagaagaaaacccaaatattataggcagaaatgctaaagggtttacctgcccnggcggnccctcgaaagggcgaaattncacacactggcggncgtncttagnggatnccacctccgggacccaaacttggggngnaatcatgggcaatancttgtt

SEQ ID NO: 566 - DNA, 607 bp, Homo sapiens
  misc_feature 403, 477, 499, 505, 514, 527, 537, 543, 564, 571, 581, 584,598, 603: n = A,T,C or G
aaaattattgagatcatgaaaaacaaggaaacattaataaatttccatagattggaagcaaataagatatgatgactaaatgtgacataatattctggattgcatcctggaacatgaaaaggacattaatgggaaaactggtgagctacattatacaaaataactgatcagtgctcttcaaggtgtcaagattatcaaagacataaaagaatggatgaactgccatagattggaggagacaatgcaatgtgaaatcctgaatttgaccctgaacagaaaatgcaatgtagtggagaaactggtaaaatgcagataaaatctagtttagttaatcatattgtaccaaagttcatttcttagttttgataactcttgatgggtataaaagatgttgaccatgaanaatgcttggatgaagtggtgtgccaccaacctggttgctggtttttgccaccttttcttgtaatttttaccttngggccgggaacccccccttaangggggnaaattcccncccccccttgggnggggccgttnccttanggggaatcccaaactttgggnccccaanctttgggggnaancaatgggccatacntgttncccc

SEQ ID NO: 567 - DNA, 555 bp, Homo sapiens
  misc_feature 393, 404, 430, 452, 453, 468, 500, 509, 519, 529: n = A,T,C or G
cctacccattctcctagtttcttgttgtcatcaaccttaattaggttgatttggtgttcagcacaaagggcctccaccaacttgacatacataggctcatcacagttggatgcaagcacacaaagatgggcttggcgccttttcctaggtttccggtaggacggatgccattcagaacttttgcgctaacaccatgaactccatgccttcttcccttgggtggcagttttgttccggttgcaagaacccacagtattgagactgatacacgtacttgtctaagctttggcagcttcgcgaattccacgtgctaggccatcgtggatgaagggcagtcttcagaacctcttgtaaaagcagtattaaccgtccattacaccttcacaacaatgnctttcttcggncatggcgggggggtaccgggtgaaanttgaaactttgaaccacccaanncttccgctttcggcnaaattgggaaccttgcccgggggggccgtttnaaaaggggnaaattccaanacacttgggngggccgttactaaagggaatcccaaa

SEQ ID NO: 568 - DNA, 325 bp, Homo sapiens
aaaaaaatcaacagtgttaacagtgggtgggtatgtttccagacctctcaattcactcatatgtacagacaggattgacggggggaatccctaaactttttattctaacaagttttatttatttattttcttttttgacatggagtctcgctctgtcgcccaggctggagtgcaatggcgtggcctcggttcactgcaaccttcgcctcccgggtttaagcaattctcctgcctcagcctcccaggtagctgggattacaggtgcatgctactgcgcccggctaatttatgtatttttattagagatggggtttcaccatattgg

SEQ ID NO: 569 - DNA, 267 bp, Homo sapiens; identical to SEQ ID NO: 436

SEQ ID NO: 570 - DNA, 451 bp, Homo sapiens
  misc_feature 344, 393, 414, 415, 424: n = A,T,C or G
aaaaactcatcattgccatgtccaggagaggcaatctagctggagtcaggtgatccagtccattcctgtcaaagcctccaacagctacagcacaaacaccatcagtttgcgatggctggggggccttctggaagaagagaggcaaagaaagtcttgaagacaagccatgctgtgctcataaaggaggggctggtctgctcgccatctagtacatccctgtctggagggaggtggttggggtcttcagtttcaggatcagtgccttcctgtaagttattgttggggtcctgatttacaacgtcaggaggaggaccatcatttgggaagttctgaaccggcctcgnctaaatggaaccacccaacgtgatgccttcaaaggaagcacataaaagnccttttaactgatgtcacagnnggacttctnaagaatccaaggttccccccctttatc

SEQ ID NO: 571 - DNA, 385 bp, Homo sapiens
ccacagctaacatcattgcagcacctttactccttcggctgtgatccaatctccagctcactttttgccagcaccaacattggcctttgcagtccccctgactttcttcattctgttcttgcgttcctttcgttgctttcttgaggtctttttcttctcatacaggccatgtcttgcaagtctatgtttgggttcatttttctttgcataatccagggaatcataaatcatgccaaagccagttgtcttgccaccaccaaaatgagttctgaatccaaatacaaagatgacatccggtgtggtcttgtacattttggctagtttttcccgaatttctgtcttaggcactgtcgcttcccggggtgaaggacatcaatgaccattt

SEQ ID NO: 572 - DNA, 582 bp, Homo sapiens
  misc_feature 371, 479, 493, 529, 531, 533, 542, 557, 560: n = A,T,C or G
ccacttggacctttggcaggaaatcttcactgtgccaaagcattgtgtttctggagccggagctgcctgaggcactcttctccagcctcctcagccttccatggagctgcagaccctacctagacctacccctgccgggctccaaacagatccccctacccattcctttcatgtactgtttggtcctggaagaggctcacacaagttggctttgggttttgcttcaacatagaaaccacgagccttataccttgaatatgggtagtttcattgccagtaatgggaactctggaactgccaaagggactgtatcctctttctgacctggtgttgctttcttttgttaggcttcccagctctgtgcccagcancctgtccagaatgagctgttcagagatccaacaactgcagtctccttattcacttttaaagaattgaaaaccaaaaaggtgagtttctttccttaggaaggttcaaanccccccttcttaantttccctggttgaaaactttttgctggcttgccccntntngggaaaccnggggggaagggaacnttnccaaaaaaatttcccggggggg

SEQ ID NO: 573 - DNA, 540 bp, Homo sapiens
  misc_feature 8, 78, 107, 165, 200, 206, 233, 234, 344, 377, 395, 407,411, 429, 483, 496, 505, 518, 530, 538: n = A,T,C or G
ccactgcngactgagcggtggaccgaattgggaccgctggcttataagcgatcatgtttctccagtattacctcaacnagcagggagatcgagtctatacgctgaanaaatttgacccgatgggacaacagacctgctcagcccatcctgctcggttctccccanatgacaaatactctcgacaccgaatcaccatcaanaaacgnttcaaggtgctcatgacccacaaccgnnccctgtcctctgagggtcccttaaactgatgtcttttctgccacctgttacccctcggagactccgtaaccaaactcttcggactgtgagccctgatgcctttttgccanccatacttttttggcatccagtctctcgtggcnattgattatgcttggggngaaggcaatcantggnggcattcaccccttaaangggaaccacatttggacttttttttttttcatatttttaacctttgggcccggnaaccccccccttnaaggggccnaaatttcccaacnaccaccttgggnggggcccntt

SEQ ID NO: 574 - DNA, 510 bp, Homo sapiens
  misc_feature 428, 436, 439, 443, 450, 460, 464, 467, 482, 493, 500, 501: n = A,T,C or G
aaaatttagattagcacaccttactaatctgacagaacctggattctcttgatattggaagaagatgagagtggataccggggaagtcactagaagtatctgtcactcttggctggacagcaggctgcaaacatattaccacttgatggaggcatcatgctctggtcgcaatccgtgtgcatcaggtaccagtaacaaagtggtactgagaaatatcctcatgtcacatagatctcaatatgccattggtcaaggaggttgtccagaaggaaattaggacgttatcaaggatgaagctatagtaaaaatactataaacaaacctttcttgatgaggcttaagggttatttagaggagtataaccttaaaaataaagatgaaaaatttatgaaccgggctctgttttcatgatgagagagtacgtgcantcccctgnccnggcnggcgctngaaagggccnattncancacctggcggccgtnctatggatccnacttggnncaaacttgg

SEQ ID NO: 575 - DNA, 512 bp, Homo sapiens
  misc_feature 403, 494, 500, 503: n = A,T,C or G
ctgaaaacagtgggaggccagatgctggcatcttccagacgggagcatagccatggtcactctagccgatgtctcctggggctctcaggcggcaaggaccagatgcaccactactgtccaatcccagttttacttagagccacctccttttttggggccattagtccttatttcatgccagattttcactagcggctccctgttcttccaaatcagttcatgaccgtaagtaacataccatattccaaaaagagctcccccaagatgtgccgcatgatcaaaaaatttccatcccaggatcattcctgctgtatccatggcgataatggctttcagggcattccctgctgtgaacgtgaacatcggaaggaaaataatggcaagcctccttctgggatcttantgcagacagacctgcccgggcggccgttcgaaaggggaattccacacactgcggccgttctatggatccaactcggaccaacttgggtaanatggcntantgttcctgg

SEQ ID NO: 576 - DNA, 437 bp, Homo sapiens
  misc_feature 310, 331, 359, 415, 424: n = A,T,C or G
ctggtgctctgggtctaccctacctgacatccttccagtcttatcctttgtttcctatccaggcccaggcttgtggctgagaacatccactttcagtcccatatacctgcctccaagtgtggtacagagaacttgggcctgctgggggcgcttagccttactctctccaccacctctcccaccaacccccagatgaactgcaggtagacgtttcttccttgcttggagccccagtttttgcatttcattttcattaaaatgaaaggtggtttggttttggttctaaggagctctacagtttaacagaaangagggaccttagggggccaanaaagcaggggcctaccaagtatctcccntttgaaaatggaatactgataaaaaatttttacctgcccggcggccctcaaaaggngaaatccanacactggcgggcg

SEQ ID NO: 577 - DNA, 267 bp, Homo sapiens; identical to SEQ ID NO: 436

SEQ ID NO: 578 - DNA, 354 bp, Homo sapiens
aaaactcaatgtttgcctaatcaaagatcatctggctaaactgctcccccacttctgcttagctactttggaagcacaaaagttacccctttccatccttggcccttccctggttggtacatctagttatgagatagacgcgcaccacttaacaaatcactcccttttgaccgcaggttgtttctcttccatatttgacgaggctggcaacagctcccgaatcttggcctagcacatcacgaattgggaagctaaagctttagcttagaatgccaagtgacaaggacatggctgaagcaggaggggaaattctggaacaagtgcctctgggcaaacctcacaaccgagtttttt

SEQ ID NO: 579 - DNA, 402 bp, Homo sapiens
  misc_feature 283, 365, 366, 376, 379, 387, 389, 392: n = A,T,C or G
aaaaggctagaacatcctttgacttcttgaaaatctgcatgtctggcttgggttttattaccacatgcctgagttcttcaagaatggaaggctcaagtattctcatcttccatttgccaaacttccttcctgatttgagtcacgtgttccacttggaaagaaagggaacagagagcctcctccatggacagtgtatgaatttcattgggaatcttgctctctcccgcctctatgcctttctctctttttaaccttactttacataatattatagatgggccangaaaagaaaagatgacataacattttgatgaattacacctattccattcttcacgtttcacaattggtccgaactttggttnnaagaataatngtnagaaggcntnggntccaaaaaac

SEQ ID NO: 580 - DNA, 524 bp, Homo sapiens
  misc_feature 407, 442, 447, 477, 513, 517: n = A,T,C or G
ccattgatttaggccactggcttagagtactccttcccctgcatgacactgattacaaatactttcctattcatactttccaattatgagatggactgtgggtactgggagtgatcactaacaccatagtaatgtctaatattcacaggcagatctgcttggggaagctagttatgtgaaaggcaaatagagtcatacagtagctcaaaaggcaaccataattctctttggtgcaggtcttgggagcgtgatctagattacactgcaccattcccaagttaatcccctgaaaacttactctcaactggagcaaatgaactttggtcccaaatatccatcttttcagtagcgttaattatgctctgtttccaactgcatttcctttccaattgaattaaagtgtgggnctcgtttttagtcatttacctcggccgcgaccacnctaanggcgaattccacacactgcggccgtactantggatccaactcggaccaacttggcgaaacatgggnatantgttcct

SEQ ID NO: 581 - DNA, 504 bp, Homo sapiens
  misc_feature 398, 404, 467, 474, 489, 493: n = A,T,C or G
aaaatgttcatgtagaaaattaatgaactataggaatagctctaggagaacaaatgtgctttctgtaaaaaggcagaccaggggtgtaatgtttttaatgtttcagaagcctaactttttacacagtggttacatttcacatttcactaatgttgatatttggctgatggttgagcagtttctgaaatacacatttagtgtatggaaatacaagacagctaaagggctgtttggttagcatctcatcttgcattctgatcaattggcaagaaagggagatttcaaaattatatttcttgatggtatcttttcaattaatgtatctgtaaaagtttctttgtaaatactatgtgttctggtgtgtcttaaaattccaaacaaaatgatccctgcatttnctgaanatgttacctcggccgcgacacgctaaggcgaattcaacacctggcggccgtctagtggatccnactcggnccaagctggcgaatntggnatactgttcct

SEQ ID NO: 582 - DNA, 511 bp, Homo sapiens
  misc_feature 456, 471, 474, 492, 496, 508: n = A,T,C or G
aaaatttagattagcacaccttactaatctgacagaacctggattctcttgatattggaagaagatgagagtggataccggggaagtcactagaagtatctgtcactcttggctggacagcaggctgcaaacatattaccacttgatggaggcatcatgctctggtcgcaatccgtgtgcatcaggtaccagtaacaaagtggtactgagaaatatcctcatgtcacatagatctcaatatgccattggtcaaggaggttgtccagaaggaaattaggacgttatcaaggatgaagctatagtaaaaatactataaacaaacctttcttgatgaggcttaagggttatttagaggagtataaccttaaaaataaagatgaaaaatttatgaacggggctcttgtttcatgatggagaaggtaccgtccagtccacctgccccgggcgggccgttcnaaagggcgaattccncanctgcgggccgttactagnggantccacctcggtncaa

SEQ ID NO: 583 - DNA, 543 bp, Homo sapiens
  misc_feature 406, 410, 422, 455, 467, 485, 491, 498, 500, 511, 517: n = A,T,C or G
aaacctttatactcccctgaatgaatttgaagaacgggtaacagtggcctttatacgaacaatccaggcacaactacaagagcggaatgaccctcagcaactgctattagatgccaagcacatgtttcctgttttgtttccatttaatccatcttctctaaccatggactcaatccacatcccagcgtgtctcaatctggaattcctcaatgaagtctgaagatgcatgtttccagcattagtttgattcccaatgtgagcaagaaggaagtatatacagtaaagtaaattcaaggatctgttaaatctggtaaaagtagatcaaatcagagattgacagcctgtggagggtgcttgaactatacagaattagacacactatgtcattattttttggacctactgnttanaataaaaacacnttgaaatatgacctcggccgcgaccccccttanggcgaatttccncccactgggcggccgttnctagtnggatccnanctcgggcccancttggnggtaatcatgggcttagtgttcctgg

SEQ ID NO: 584 - DNA, 446 bp, Homo sapiens
  misc_feature 362, 393, 401, 409, 415, 421: n = A,T,C or G
cctttcactgtggtctgggaaagaatcagtaagatgacagggctgacttcattagatgaggagcttttctatccagtttcctggaggaataaggacactgccttttcagattaaagattgtctgatttagagaccatggaggtggacagagaataacaaaaccgtgatggcagtcatcatgcttattgcagttagcacacacttttcctgacaggcacagtgctgctgtgctctacaaatgaccatgaaatagagcacgccatgactttaggacacagggatttttatgggaagagagttcatcagggactgattacgtaggagagacgatgcaggggaaatggtggacctgcccgggcggncgctcgaaagggcgaattccaccactgcggncgtactantggatccnactcgnacccancttggcgtaatcatggcatactgtt

SEQ ID NO: 585 - DNA, 308 bp, Homo sapiens
ctcttgttgaaatccgaaatttcttgggtgaaaaatatatccgcagggttcggatgagaccaggtgttgcttgttcagtatctcaagcccagaaagatgaattaatccttgaaggaaatgacattgagcttgtttcaaattcagcggctttgattcagcaagccacaacagttaaaaacaaggatatcaggaaatttttggatggtatctatgtctctgaaaaaggaactgttcagcaggctgatgaataagatctaagagttacctggctacagaaagaagatgccagatgacacttaagacctact

SEQ ID NO: 586 - DNA, 333 bp, Homo sapiens
ccagaggagggaggggcacagtgaagaagggagcccaccacctctccgaagaggaaagccacgtagagtggttggcatggggtgccagcatcgtgcaagctctgtcataatctgcatcttcccagcagcctggtaccccaggttcctgtaactccctgcctcctcctctcttctgctgttctgctcctcccagacagagcctttccctcaccccctgaccccctgggctgaccaaaatgtgctttctactgtgagtccctatcccaagatcctggggaaaggagagaccatggtgtgaatgtagagatgccacctccctctctctgaggcagg

SEQ ID NO: 587 - DNA, 111 bp, Homo sapiens
ccatgaagctcttagacaaatctatctctctggacttcattcctggaaaaagaagttcatcagattcaagaacggcatcatcactggcgtgtacccggcaagcccctccag

SEQ ID NO: 588 - DNA, 606 bp, Homo sapiens
  misc_feature 49, 67, 72, 77, 80, 106, 121, 181, 212, 220, 269, 311, 337,341, 350, 354, 365, 374, 393, 404, 405, 436, 439, 441, 456,458, 498, 517, 525, 526, 544, 547, 571, 575, 576, 593: n = A,T,C or G
gagcccacaggggaagagcagcggaaggggcttttcggaacgaatttgnattgaaaggaagtggaanaaacncgganccntggccgttgtggttgctgtttgcggnggtctagggaggaanaagttgacacacttggtaacggcttgctgtcagccttacacatcccgggactcacacggngctttggagaagaggttgttcacaacaggtntccagcantgaggacctgcccatttcaatggaaaatccttataaagaacctcttaanaaatgtatcttgtgtggaaagcatgtagattataagaatgtncactttttgtcccagtttgttctccntttnctggatgcntttntggaaggcccnttacaggtntttgtggaagaacccgaangaatcccaaanncatttagaaaactcaatatggggtttttccnttncntccaaggatcctgcntntttaaggccctaagttgtacctcaaattcgggaataaatnttttccttcccttataacntttttccnnaagggttgttaagccatntgnttaaaccacctttgataaaaaagntttnngaggggggaaaaaaacnttccttttccaat

SEQ ID NO: 589 - DNA, 597 bp, Homo sapiens
  misc_feature 471, 488, 496, 508, 539, 547, 568, 577, 581, 585: n = A,T,C or G
aaatagctgagcacctactggaagaattcctgggctaaatgctgaaaataaaatttaatttctgcacagaaaataccattaacttagtagcctttgcttaaaggtgggattaattctccatgaagtcagaatgagacaataagcagcattaacttcataggcacacagaactagtgctcaaactgctagcacaaattccaacagagtacataaggctaagtcactactcaagtgtccatttccatcaaatttagagactctccctatgcatctaagggaaggaattatcactgaatataaatgcctccaggagaaacggagaattcagttaaggttaaattagacaaaagataataagtgcaagtactagagaaatgttgctggagataaaccataaaaatttgtgacctaaccgtggcatggggtgaatcgcataagctgctagctggtgaaccccagtgtttcaagatncactttttataaaccgntttatttnggtttgcttatnccatcaaaactggaaacttcctgcccctganattccctngaaaccggggaaatcaatttnaaaaccccnttcntggnggcctttcaaaa

SEQ ID NO: 590 - DNA, 569 bp, Homo sapiens
  misc_feature 372, 471, 474, 478, 493, 504, 518, 530, 538, 544, 551, 566: n = A,T,C or G
ctgatagcctggtgcccttgactgtccaaaactgttacaggcccatagtccaagacaagattctcatgagaaaaagtgcaggagagacaggaaatgggaccccaggagtctgttctcatgacatgaattcagtggaaacaatgggatgggtccgctcttttccagtttttggttgactttcttctttgatgatctttctttctcctgacccttccgcccaccctgaccctctcccagggatgggaagcaggatattttcataaagcctttgttcctgggaggagctcatgctctgtctcgggtcaaactctcccttcccattccaactactcaggtgcccatggacttcctgcaggaacatctccaggagtncaggcttccttgcccatattttatctgggatgggagtaaagaccacccgtctaattcacgtaaaatctaaattgctttttaccttgcccgggcggccgntcnaaangggcgaaatttccancacacttgggnggccggttcctaangggaatcccaancttcgggncccaancttgggngtaaatcattgggcnatt

SEQ ID NO: 591 - DNA, 663 bp, Homo sapiens
  misc_feature 376, 397, 438, 452, 456, 472, 477, 498, 499, 510, 535, 553,558, 568, 578, 583, 593, 618, 639, 643, 654, 657: n = A,T,C or G
agaaaatgtcgacattactctgaagggacgcacagttatcgtgaagggccccagaggaaccctgcggagggacttcaatcacatcaatgtagaactcagccttcttggaaagaaaaaaaagaggctccgggttgacaaatggtggggtaacagaaaggaactggctaccgttcggactatttgtagtcatgtacagaacatgatcaagggtgttacactgggcttccgttacaagatgaggtctgtgtatgctcacttccccatcaacgttgttatccaggagaatgggtctcttgttgaaatccgaaatttcttgggtgaaaaatatatccgcagggttcggatgaaaccaggtgttgcttgttcagtatctcangcccagaaagatgaattaatncttgaaggaaatgacattgagcttgtttcaaattcagcggnttttgattcacaangccncaacagttaaaaacanggatntcaggaaaattttgggatggnntcttttgtctnttaaaaaaggacctgttcaccaggnttgtgaataaaaactaanaattncctggctccnaaagaaaatncccantgacctttanacctctttggaatttacctgccggngggccttcaaaggggaattcncccnttggggccttnttngggacc

SEQ ID NO: 592 - DNA, 297 bp, Homo sapiens
ctgtagccgagagtcaccaggtccccacagggtgtcagagagggtgtggagctgcttagcactcagcatcactgtctggttaaacacagtccagatgacaccctgggcacagggcggtgtagtcagagacccctcatattggaagtagcggctgaagtcagagggcaggagtgcagatatgtccagtcctgggacctgagtctctgagccttcctcagcgatttcttccaagcgagacagcaactgctcataggcactgttttcttccgggccctcctccagaaaggcggccaacac

SEQ ID NO: 593 - DNA, 337 bp, Homo sapiens
ccaccatttcccctgcatcgtctctcctacgtaatcagtccctgatgaactctcttcccataaaaatccctgtgtcctaaagtcatggcgtgctctatttcatggtcatttgtagagcacagcagcactgtgcctgtcaggaaaagtgtgtgctaactgcaataggcatgatgactgccatcacggttttgttattctctgtccacctccatggtctctaaatcagacaatctttaatctgaaaaggcagtgtccttattcctccaggaaactggatagaaaagctcctcatctaatgaagtcagccctgtcatcttactgattctttcccagacca

SEQ ID NO: 594 - DNA, 362 bp, Homo sapiens
cctgctgggaacgggacttctaaaaggaactatgtctggaaggctgtggtccaaggccatttttgctggctataagcggggtctccggaaccaaagggagcacacagctcttcttaaaattgaaggtgtttacgcccgagatgaaacagaattctatttgggcaagagatgcgcttatgtatataaagcaaagaacaacacagtcactcctggcggcaaaccaaacaaaaccagagtcatctggggaaaagtaactcgggcccatggaaacagtggcatggttcgtgccaaattccgaagcaatcttcctgctaaggccattggacacagaatccgagtgatgctgtacccctcaaggattt

SEQ ID NO: 595 - DNA, 546 bp, Homo sapiens
  misc_feature 361, 393, 450, 471, 472, 482, 501, 509, 519: n = A,T,C or G
aaaattataagatttacagtgccttgattatgcaaaatagcataatggaaattaaaccaaatcaataaaccaaagagaaagaaaacttaattttctctagtatccatacttaaaccatctttgtaagtatctgatgtcccaaccatgtcttatgtagaaagtataatcgtttcaaatgtttcacttgcaggtttaatttctcattttcaatttttatgaactgtaatgcaatttcaaatcctattatacctagtgtttatactgcaacagcagcaaatctcacatgtgtaatcaaatgtggaactggggcacagcttctagctgtagacagaaattatacactgcattcagtccaggagangtacattacattaaccagagcgtagaagttantaccttattgcaggggtgggatttctttccctctgactgaatcaaaactcggccgcnaccccctaagggcgaaattcnncccactggcnggccgtactagtggatccnacttcggnccaacttggngaaacatgggcattactgttccctggg

SEQ ID NO: 596 - DNA, 468 bp, Homo sapiens
  misc_feature 194, 214, 280, 282, 285, 316, 325, 326, 342, 362, 371, 392,396, 398, 407, 412, 435, 436, 451: n = A,T,C or G
ctggcaggacctgaaggatcacatgcgagaagctggggatgtctgttatgctgatgtgcagaaggatggagtggggatggtcgagtatctcagaaaagaaagacatggaatatgccctgcgtaaactggatgacaccaaattccgctctcatgagggtgaaacttcctacatccgagtttatcctgagagaaanaccagctatggctactcacnggctcggctgggtcaagggggcccgtgactctccataccaaagcagggggttcccccactactttntntcntttagggcccttcttgaaacaggggaagggnaattttttnntttttttttttagggnaacctgaacccttttttggnccccaaaantccccttcccaaattgggggntttngnggtttaggnaaaantttttaaaattttttttttaccnncccggggggcctttnaaaagggggaaattccc

SEQ ID NO: 597 - DNA, 551 bp, Homo sapiens
  misc_feature 400, 407, 426, 429, 450, 461, 462, 477, 481, 498, 534, 536,548: n = A,T,C or G
gagagatatgaactctaacaaaggactgaggagtgcagtctgctggttcaggctcttcaaaagatgtagaaaaagagatagaaggaaccacctatgcttaaaatactgtaaatatgcagtgaggtttggcaaaatctattccatgtgtgatttgcttgtagaaacaattttgaaagccccttgaggaaaataaaaatcaagaagaacacttttctcccttttccatacaaattaaaacttaacagcatcaaattattgggaccagaaaccaagtaatgtataatgggggcttttgttgagttaaataagatgctatataatggagaagaatttgaaaatgcacaaaaaaatcaatctacattatcagacctgcgtgaaattaactatgttaataaaccanttgcagngcccaactataggtctttntcnctaccaggagtacaaactgtntggccggtaannctagctctattgtgnttgnctgctttactgttgtanactactcgtgcttgatattctgcgcccagatccctngnttgcctgcctgntgt

SEQ ID NO: 598 - DNA, 300 bp, Homo sapiens
  misc_feature 234, 242, 243, 244, 254, 264, 276, 278: n = A,T,C or G
gggaatgtgaaatttacatcatttctttttgggagagacttgttttggatgccccctaatccccttctcccctgcactgtaaaatgtgggattatgggtcacaggaaaaagtgggttttttagttgaattttttttaacattcctcatgaatgtaaatttgtactatttaactgactattcttgatgtaaaatcttgtcatgtgtataaaaataaaaaagatcccaaataaaanaaaaaaannnaaaaaaaaanaaaattttcnttcccggggggncntttaaaaggggaaattcccccc

SEQ ID NO: 599 - DNA, 338 bp, Homo sapiens
  misc_feature 258: n = A,T,C or G
ccaggccatgttatgggatctcaacgaaggcaaacacctttacacgctagatggtggggacatcatcaacgccctgtgcttcagccctaaccgctactggctgtgtgctgccacaggccccagcatcaagatctgggatttagagggaaagatcattgtagatgaactgaagcaagaagttatcagtaccagcagcaaggcagaaccaccccagtgcacctccctggcctggtctgctgatggacctgcccgggcggncgctcgaaagggcgaattccagcacactttggcgggtactagtggatccaactcggaccaaccttgcgtaatatggcata

SEQ ID NO: 600 - DNA, 545 bp, Homo sapiens
  misc_feature 7, 415, 478, 485, 491, 507, 523, 526: n = A,T,C or G
aaatcangagcatataggtcataataaaatgagctacaggcacaaagccagtaacacatttatggtccgttcatctggaaaagtttcaccgcccactccccactcctcttccccctcctggaagcggccagctttatccttggcattttaattttagagaaaatttaaacttccatgctgccctgtggcttcggtcaatggagcttctttctccagttatggaatgagtcagcaaaacgggggagttctgatccttggaattagggagggacagtttacagaatgtcctcatttcactcttttcccaatcatgggaaatatccagccaattctggttttaaagattcatatcaaattcaaagtccctccctccttttggcgaggaagacaaccctttggagcgaacacaaaagancaaatgtaaaatccatcttgggcggggcatggtggctcaccctgtaatcccacactttgggangccaagnaggcanatacgaggcaaaaatnaaacatctggactcgncgnacacctaggggaattcacc

SEQ ID NO: 601 - DNA, 232 bp, Homo sapiens
ccattatatcagcaagagatgcaccagtaatggccctctggaatttgactgctcggcgggttcttttcttttgaatttcttccgactgtccctttttgtgcttccttctgtagaggacagtccagtttatctgccgaggattcctcttggaaaggaaagccgactcgcatttcgcattaagaaactggaaaaccttcccgtcggtcctggcgtagcgcctcccgtgtccggg

SEQ ID NO: 602 - DNA, 287 bp, Homo sapiens
ctgaagcacttctcctagatttgctcttaacagaacgaatgcatacgctacagattcctcaacggaatcaacagaattcctttctccacattcctaaaactgggtaccacggtccgcaataatagtcaccagacccatcatcacaggctatgtcactaaaactgaccgaagcgttttccagttcacattttcctaaagattttataatgtgacaacccttctctccttagaaagttatacttctggcacttgaaatgctggatttgttgtcagtttacctgccggcg

SEQ ID NO: 603 - DNA, 416 bp, Homo sapiens
  misc_feature 320, 407, 415: n = A,T,C or G
cagcctggaggtttggagactcattctggaatctagtgtgggtcaagccaacttcagggagaggctgagccagggtaggagtcacaggagcagacgaggatgtggggtgccgtgcacagagctccatgaccagcttgggaagttagaaggaaggggaggcaggaggctgcttagtctgctgccatgatgggccccatgaatggtggctctcaagcttctgtgctacacaggggtgtctggtggccttgtgacctgccgcagccatgggggctgtggacgaccccatctgctccctctctgaactccatggggcaccacangaatctggacctgtgccacaaccacagcagttgcctctgccctgccacaaacctcggccgcgaccacccttaagggcgaaattccancacacttnt

SEQ ID NO: 604 - DNA, 364 bp, Homo sapiens
  misc_feature 309, 318, 328, 355: n = A,T,C or G
aaagagcttatcctcagaaataagcttcgtcttgagttgttgaactacaaaacactattttctgcagtcatccgaagaattgtgccattacttgtgatgcctctgaatgtggaggctgactctccctgtctctctgtccctcctaccccacggggccgcagcaaaagccatcctgggccttcgactgggccatgtcttcaggaagattcctgaagaggagggcccgaaatacctgcctttataggttcccagagtgccctaaacattcttagatacatattttttacctgccccggcggccgtcgaaanggcgaattncacacacctntggcgcgtactatggatccaactcggnccaacttgg

SEQ ID NO: 605 - DNA, 775 bp, Homo sapiens
  misc_feature 159, 176, 177, 237, 305, 387, 410, 432, 435, 443, 444, 445,474, 475, 506, 521, 527, 533, 540, 550, 565, 573, 580, 581,586, 590, 613, 624, 633, 643, 649, 650, 656, 669, 675, 680,701, 704, 735, 741, 746, 747, 751, 762: n = A,T,C or G
actggcattccttcgacttctctccagccgagcttcccagaacatcacatatcactgcaaaaatagcattgcatacatggatcaggccagtggaaatgtaaagaaggccctgaagctgatggggtcaaatgaaggtgaattcaaggctgaaggaaatancaaattcacctacacanntctggatgatggttgcacgaaacacactggggaatggagcaaaacagtctttgaatatcnaacacgcaaggctgtgacactacctattgtagatattgcaccctatgacattggtggtcctgatcaanaatttggtgtggacgttggccctgtttgctttttataaaccaaactctatctgaaatcccaacaaaaaaaaattaactcccnatgtggtcctcttgttctaatcntgtcaaccagtgcaagtgaccnacnaaaattcnnntatttattttccaaaagtttggaaacaannttaatttgccaaaaaaaaaaaaaaccttttnttttttttttgtccncccaancaaatnaaaaagntttttttttnttttttttcccaatnccaatttnaaaaagnntcaangggncttaaaaaaaaaacttcaccccntttttataaanaaccggggnttattttttnaaaccnncccccntccaaaaaaaaanggggtnccccnaaaaaaaaccttttttttttnttnaaaccaaaataaaaaaccccctttttttttnccttgngaaannaaanttttttttccnaaaaaaaaatttc

SEQ ID NO: 606 - DNA, 343 bp, Homo sapiens
  misc_feature 310: n = A,T,C or G
cccgaatttttggctatgatggctagaaaaatgaaagatacagatagtgaagaagaaatccgtgaggcattccgagtctttgacaaggatggcaatggttatatcagtgcagcagaactacgtcacgtcatgacaaacttaggagaaaaactaacagatgaagaagtagatgaaatgatcagagaagcagatattgatggagacggacaagtcaactatgaagaattcgtacagatgatgactgcaaaatgaagacctgctttcaactcctttttcccccctctagaaaaatcaaattgaatcttttacnttacctcttgcaaaaaaaaaaaaaaaaaaaaaa

SEQ ID NO: 607 - DNA, 255 bp, Homo sapiens
  misc_feature 247, 249: n = A,T,C or G
ctgtggccctgactcactggccctgctggcatttattcagcacatattaaatgacgaaggctttgagtcaacaccatcagtgggtaatcaatctggttgccctccccctaccctgagagagctatcctgcccataaactatcaaaggttagttttaggaccacataagtaaacaagtcatttagataaactacatttctgtgtatctatgccctaagcttttaagagaattcagacctcggccgcgncnccctta

SEQ ID NO: 608 - DNA, 365 bp, Homo sapiens
  misc_feature 303, 352: n = A,T,C or G
ggaaacacttcacgaaggggcaaaagtggcttcaattctaagagtggacagcggggatcttccaagtctggaaagttgaaaggagatgaccttcaggccattaagaaggagctgacccagataaaacaaaaagtggattctctcctggaaaacctggaaaaaattgaaaaggaacagagcaaacaagcagtagagatgaagaatgataagtcagaagaggagcagagcagcagctccgtgaagaaagatgagactaatgtgaagatggagtctgaggggggtgcagatgactctgctgaggangggggacctactggatgatgatgataatgaagatcggggggatgaccanacctcggccgcga

SEQ ID NO: 609 - DNA, 205 bp, Homo sapiens
aaaatgctttggtggcacttttgtaaacagattgcttctagattgttacaaaccaagcctaagacacatctgtgaatacttagatttgtagcttaatcacattctagacttgtgagttgaatgacaaagcagttgaacaaaaattatggcatttaagaatttaacatgtcttagctgtaaaaatgagaaagtgttggttggtttt

SEQ ID NO: 610 - DNA, 140 bp, Homo sapiens
aaacttgatccaacctctttgcatcttacaaagttaaacagctaaaagaagtaaaataagaaggcaatgcttgtggaatgtacagtgcatattggcggcgcacgcctcattacgattcgcctgcttgcttctcctgttca

SEQ ID NO: 611 - DNA, 541 bp, Homo sapiens
  misc_feature 335, 393, 411, 429, 452, 457, 462, 465, 488, 499, 528: n = A,T,C or G
tccctctgtggaagatattcaaaagccacaagtggtgcaaatgtttatggtttttgtttttcaatttttattttggttttcttacaaaggttgacattttccataacaggtgtaagagtgttgaaaaaaaaattcaaatttttgggggagcgggggaaggagttaatgaaactgtattgcacaatgctctgatcaatccttctttttctcttttgcccacaatttaagcaagtagatgtgcagaagaaatggaaggattcagctttcagttaaaaaagaagaagaagaaatggcaaagagaaagttttttcaaatttctttcttttttaatttanattgagttcatttatttgaaacagactgggccaatgtccacaaagaattcctggtcancaccaccgatgtccaaangtgcaatatcaaaggaanggcaggcgtgatggcttatttgntttgnattcnaangatggcttttcccctcggccggnaacacccttangggggaatttccacacacttggcggccgntactagtggatcc

SEQ ID NO: 612 - DNA, 341 bp, Homo sapiens
  misc_feature 1, 2: n = A,T,C or G
nnctggggtacaagcagactctgaagatgatcagacaaggcaaagcgaaattggtcattctcgctaacaactgcccagctttgaggaaatctgaaatagagtactatgctatgttggctaaaactggtgtccatcactacagtggcaataatattgaactgggcacagcatgcggaaaatactacagagtgtgcacactggctatcattgatccaggtgactctgacatcattagaagcatgccagaacagactggtgaaaagtaaaccttttcacctacaaaatttcacctgcaaaccttaaacctgcaaaattttcctttaataaaatttgcttgtttt

SEQ ID NO: 613 - DNA, 430 bp, Homo sapiens
ctgcaccacacttccagcaaggcctttgggaaaggtgggagagctagaggaataattaaagctggtggaactcagttggagtttagaaagcttcccataaaatgcctgcttgatgctgagttgggaggggagagaagaaggctccagaggctcactgagccccttccctggctctcggggtaatttccagaagggcaagtccatgacaaagggcatcccttccaagtgacccaccagttccaggggactatgcccagtagctttcctgttctcggcatttgccttaagaggaccccccacaaaagtcttctcattcttgacgctgccaacaaaggcatgtgggctttggaacccagtcttcccttggagtctgtaccccaccagacatggaagtttgtgctttggtcccaacaccctcgggccgcgaaca

SEQ ID NO: 614 - DNA, 377 bp, Homo sapiens
aaacttaaattacctctcaagagaccaaggtacatttacctcattgtgtatataatgtttaatatttgtcagagcattctccaggtttgcagttttatttctataaagtatgggtattatgttgctcagttactcaaatggtactgtattgtttatatttgtaccccaaataacatcgtctgtactttctgttttctgtattgtatttgtgcaggattctttaggctttatcagtgtaatctctgccttttaagatatgtacagaaaatgtccatataaatttccattgaagtcgaatgatactgagaagcctgtaaagaggagaaaaaaacataagctgtgtttccccataagtttttttacctgccgggcggccc

SEQ ID NO: 615 - DNA, 596 bp, Homo sapiens
  misc_feature 508, 512, 525, 545, 546, 553, 556, 588: n = A,T,C or G
ctgagaaatctaggtggattcatattcgtaatcattgattaacatgcacatttgggtttgcacatttttgtttatcatacatttttctccgttttctattaaagaacatgctctaggggaactattaatagcccaccagtcgggtaggcagcattcaatccttctatgccttctttcgccacctgttgaggtctttcttctgaaacaaagaagaaatagacaaatcagacttgccctcttggaaatgtggtccagatttctctactcccaagctccaaaaaaggcatacattggatgggctagatcaactcctcctgagagccataaatccgccaagagttgttttccatgtaagggtgtgggtacaatggggaacgcctgatgttggaggaaagcaggaggactttagaagtggagttgcattctaatctctctgccgcttcaactatgtgacctggggcaaatgatataaactctatgaacctctttccttatctttacctgcccnggcnggccgctcgaaanggcgaatttcaacacacctnngcgccgnttnctatggatccaactcggtaccaaccttggcgnaatcatgg

SEQ ID NO: 616 - DNA, 214 bp, Homo sapiens
cgcgcggccgtggaaggtcagcgccgtaatggcgttcttggcgtcgggaccctacctgacccatcagcaaaaggtgttgcggctttataagcgggcgctacgccacctcgagtcgtggtgcgtccagagagacaaataccgatactttgcttgtttgatgagagcccggtttgaagaacataagaatgaaaaggatatggcgaaggccacccag

SEQ ID NO: 617 - DNA, 149 bp, Homo sapiens
ctgtgggcggctcctggtgctaacaacaaagttccacttccaggtctgcctggttccctccccaaggccacagggagctccgtcagcttctcccaagcccacgtcaggcctggcctcatctcagaccctgcttaggatgggggatgtgg

SEQ ID NO: 618 - DNA, 440 bp, Homo sapiens
  misc_feature 33: n = A,T,C or G
ttttcacaagggcttctgaagaccttaagactnatatggttgtggctaatacaatggaagactttcagaagatactagattctggaaagattgttcagattccattctgtggggaaattgactgtgaggactggatcaaaaagaccactgccagggatcaagatcttgaacctggtgctccatccatgggagctaaaagcctttgcatccccttcaaaccactctgtgaactgcagcctggagccaaatgtgtctgtggcaagaaccctgccaagtactacaccttatttggtcgcagctactgagggatgaacgaaagccccctcttcaactcctctcactttttaaagcattgatattaagtatcttctcagatacagaccgttttatgattttttacctcggccgcgaccacgcttaagggcgaattccacacactt

SEQ ID NO: 619 - DNA, 595 bp, Homo sapiens
  misc_feature 465, 502, 539, 547, 548, 552, 569, 574, 589: n = A,T,C or G
ccagctctccacgctgctcggcatctgcaatggcggcctccagggaagccctctggcctttgaggccctcaatctcagcctggagccggctgatgttccggttcatctcagagatctcagtctttgtgcgccgcaggtcatccccgtgcttcccagccaggctctgcagctcctcatacttgatctggtacatgctctcagcctcagcccggctgcggttggcaatatcctcgtactgtgccttgacctcagcaatgatgctgtccatgtccagggagcggctgttgtccatggacagcaccacagatgtgtccgagatctgggactgcagctcccggatctcctcttcatatagctgcctgaggaagttgatctcgtcggtcagcccttccaggcgagactccagctctaccttgtcatgtaagcttcatccacatccttcttgatgaggacaaattcgttctncatctctgtaccttattgatctcatcctcatacttgntcttaagtcctccaccacccctgatgttgcaactccnctcacttnncttntctggccaaattcagtncactnggcggacacctaggnaatcac

SEQ ID NO: 620 - DNA, 577 bp, Homo sapiens
  misc_feature 386, 411, 429, 495, 515, 520, 521, 530, 531, 534, 553, 569,573: n = A,T,C or G
tccctctgtggaagatattcaaaagccacaagtggtgcaaatgtttatggtttttgtttttcaatttttattttggttttcttacaaaggttgacattttccataacaggtgtaagagtgttgaaaaaaaaattcaaatttttgggggagcgggggaaggagttaatgaaactgtattgcacaatgctctgatcaatccttctttttctcttttgcccacaatttaagcaagtagatgtgcagaagaaatggaaggattcagctttcagttaaaaaagaagaagaagaaatggcaaagagaaagttttttcaaatttctttcttttttaatttaaaattgagttcatttatttgaaacagactgggccaatgtccacaaagaattnctggtcagcaccaccgatttccaangtgcaatatcaaaggaangggcagcgtgatggcttaattggtttggattccaagaatggcttttccacctcggccgcgaacccncttaagggcgaaattccacnccacnnttggcgcgnnttnctatggatccaactttggnacccaaacttgggggnaatnatgg

SEQ ID NO: 621 - DNA, 330 bp, Homo sapiens
  misc_feature 311, 317, 320, 324, 328: n = A,T,C or G
ccgggcgggttgacctccgtgcctagtcgtggctctccatcttgtctcctccccgtgtccccaatgtcttcagtggggggccccctcttgggtcccctcctctgccatcacctgaagacccccacgccaaacactgaatgtcacctgtgcctgccgcctcggtccaccttgcggcccgtgtttgactcaactcagctcctttaacgctaatatttccggcaaaatcccatgcttgggttttgtctttaaccctgtaacgcttgcaatcccaataaagcattaaaagtcaaaaaaaaaaaaaaacttgggcngaaacnacnttangggnaa

SEQ ID NO: 622 - DNA, 324 bp, Homo sapiens
aaaaataatttctattcaaaatacatgcataattgattttacacctcattactggtggataatttatgtgatgtggattgctggtgtccagcatgacccataaacaggtcagaagaatgatggaatgttttagaataaactcctgcttatagtatactacacagttcaaaagatgtttaaaatgcttttgtatttactgccatgtaattgaaatatatagattattgtaacctttcaacctgaaaatcaagcagtatgagagtttagttatttgtatgcgtcactagtgtctaatgaagcttttacctcggcccgcgaccacgc

SEQ ID NO: 623 - DNA, 119 bp, Homo sapiens
ccaaaagtttagcatattctgcagcctcttctttatttttcttggtacgctgcttcttcagagcaatacgccgccgtttgtgctgcaggacacgtggagtaacaagacgctgaatcttg

SEQ ID NO: 624 - DNA, 301 bp, Homo sapiens
ctgagattgccaagccgggaagagaccttgctccaggtgtagctgcgttttccccagatcacctgtccttttcccctccgacaaggaagctgtgatttttctctggcctttagaggcaaagtgattccagataagtagattaatgtgtagaatatctcatctgtgttgttccagtgcagccctttcagctttccagagccagttagacttgttatgaggagctaagtgattggctggctctggagctcagtttcatagattatagcccagcgtacgagaagcacgagtcctatagttggcg

SEQ ID NO: 625 - DNA, 451 bp, Homo sapiens
  misc_feature 372, 374, 376, 382, 387, 393, 404, 411, 414, 424, 435, 438,443: n = A,T,C or G
aaatttctttcaaaagtttatttagtatcaagcaagaggagactttgcttaacactacagaacatttcaagacttgagttacaaaagaataccacattatttgcacttgtaattggcttccctttttacgcatgttggcaagagaaaaaaaactagcatatggctgaaagataaaataactaaattctatggaaacctttaaaatgaaaggtgaggcttatgttaaaagaatagattaacatatttagtaaacctattttttgtttaacactagttaatcaaagttattttttttccttttgatgacctattttttcatatacagactggaaataacaaaattttacatgtctttttttttttttttttttncntnggccgnaaccnccttanggggaaatccnccccctnggnggcgttctangggaccaactnggnccaanttggggaa

SEQ ID NO: 626 - DNA, 478 bp, Homo sapiens
  misc_feature 425, 457: n = A,T,C or G
tttttttacggtttttatttttcaatttttattttggttttcttacaaaggttgacattttccataacaggtgtaagagtgttgaaaaaaaaattcaaatttttgggggagcgggggaaggagttaatgaaactgtattgcacaatgctctgatcaatccttctttttctcttttgcccacaatttaagcaagtagatgtgcagaagaaatggaaggattcagctttcagttaaaaaagaagaagaagaaatggcaaagagaaagttttttcaaatttctttcttttttaatttagattgagttcatttatttgaaacagactgggccaatgtccacaaagaattcctggtcagcaccaccgatgtccaaaggtgcaatatcacctcggccgcgaccacgctaaggggcgaattccacacacttnggcgccgtctagtggatcccaactcggaccancttgcgtaatcatggcatact

SEQ ID NO: 627 - DNA, 277 bp, Homo sapiens
aaactggacaacaaatccagcatttcaagtgccagaagtataactttctaaggagagaagggttgtcacattataaaatctttaggaaaatgtgaactggaaaacgcttcggtcagttttagtgacatagcctgtgatgatgggtctggtgactattattgcggaccgtggtacccagttttaggaatgtggagaaaggaattctgttgattccgttgaggaatctgtagcgtatgcattcgttctgttaagagcaaatctaggagaagtgcttcag

SEQ ID NO: 628 - DNA, 322 bp, Homo sapiens
aaacacagcgtttgaggcaaacagtagcaacagcagcagcaaatgcaccaaactgacgaaaagacccagatattttcctcactcatagtcagactgttgtgtctcaccccttacataacatccaagtgagatttctcacagtgctaccttggcaacaaactaaaaatatctagacaaggtcttggtttaagccttattaaaaaagctttctttgtgattatctggtatctggtttggtctccagaaaatacatagacttggagataggtaggcctcacaggacttcattctatatctttacagcatttgcaatcaaaactgg

SEQ ID NO: 629 - DNA, 496 bp, Homo sapiens
  misc_feature 442, 443, 450, 476: n = A,T,C or G
aaactctgtgacttttcctggttcaaaaggacagtcatggacagcagcagaggagtgggggtctgaaaaatgtaatctttgtgtcaaggcactctgtggcctcacaactgcccccctgtcagagggatgctgccttccagccctaaagacactagggcttttcaatggacggggtgttgaagcagccagatggtaaggtcttcctgatgtcctccagattgcgaatgtccttcatgatctcctcgatatctcggttatagtccatgatggcagcctcctgcttcttggcttcattctccaggtcagacactttcctatcaagatcgctgaccttcatttcatctttggctttgtttagggtgccttcaatctcgtttagcttattcaggtccactgtatccagacctgcccgggcggccgcaagggcgaattccacacactnntggcgcngtctagtggatccaactcggaccaancttggcgtaatcatggcata

SEQ ID NO: 630 - DNA, 459 bp, Homo sapiens
  misc_feature 71, 74, 442: n = A,T,C or G
aaaattcttactgtttatttatatattgcatagctcaaaaagtttgaaaaaatgaagttttaacaggaagncantaaatgctcatagacccccttgtctctagcacttggagtccttagagatgggaatcttgacagcagaatttcagatgtttcaatcacttgccaaggaagtgccacacttgctcttcttcattactttctttatttggtgaagatgataccgattcaactaatgatcttgcttcctcttgagtgcaacggaaagggctatcagatatcttgcacgtttgtgcaatttatagctcctccattacacttcttcataagcaatgctttccaacattgatgagtggatttaataacttcaagagcaaaagccttgtttttgaattctccattaaaagcaaactggttttctggttttcccctgcccgggcggncgtcgaaagggcgaatt

SEQ ID NO: 631 - DNA, 66 bp, Homo sapiens
  misc_feature 15, 20, 23, 26, 33: n = A,T,C or G
actactatatggcgnattgnctnctngcatgcnatcttgagtattctatacgtgtcacctaaatat

SEQ ID NO: 632 - DNA, 693 bp, Homo sapiens
  misc_feature 476, 484, 490, 523, 531, 541, 625, 648, 660, 671, 673, 686: n = A,T,C or G
aaaagtcacaaatcacagtgggagaatgccaaattgctttagcttggaactactgaagacgcacatagcatttattataaggcctactcttaggcagttcactctcaaagcaatgaaaataatctcaaaccaaacattacagtgggtttgaagcgttcctacgtttcttccgagcaggtcagttttacatttgctacacagcattccccacgaatgcctggtaattctatacatttgattctttaataaacactaaactaatagatcatagaaaactaaaagcttagagaaggtgcctccagacatatttacataaataacgtacctcacaagaaagaccaagatctcattagcggtggaatgctttttcccaaggctgggtccatgcctcatttgtcaaattaaccccatttgaggagaaatttgagtttgtggttcatgggtttttgaaaaaaaaaaaaaaaaaaagggatttnccccttgnaaaacntttttaaaataatttaaaacccaagggttcccnggtaaagncccaaccctnttaaaaaaaaggggaaaacctttgttcctttaactttttaacatttttttccctaccttaaaggaaaaaaggtcccatcccggncccttaaaaaagggggaaaaagncaaaggacgggnggccaaataantnccccccgggcctnaaggaat

SEQ ID NO: 633 - DNA, 638 bp, Homo sapiens
  misc_feature 391, 418, 422, 425, 456, 478, 531, 558, 569, 575, 582, 600,616: n = A,T,C or G
ccattcctatgcatgtctgggaggaccacagccctggtgtggagcactgacaggtttgactttccaccagaattgcttgctcagcttaatcccataatattcctttcccttagatttgttttctgtctcggtaactttttctctctgcatataaaatttcatgactaaaataactttaaagtacagagattgtattttgttgaaggaatgcattgggggggctttgggcagacttagcaaaatgtttgtatagcaaaaatgttttcttgctaaaaactgatttgcaaacttgaaagtctagatgtgtgtaggaagattttaaaattcaggcaaattggtctctaaagagaccaattttgcttcctttgtcttggttccaataaggatttantaccaaaaagttcaaaaggctggcttnccanaanaattgtacatacttctctgaacccccaaaancaagggaaaaaatacctctaancttattatttatctcaggggtaaaaactaactaccttatatttaaataaacanccctaaattaatttatttaattttggngggggggcttnaggaancaatttnaggggggaaaaaaaaggntttccaaatttttaangaaaaaacaaaaaccccccaca

SEQ ID NO: 634 - DNA, 154 bp, Homo sapiens
  misc_feature 147, 149: n = A,T,C or G
aataactttttatttgacatctacaagattttggcatcttgcagctttttaccaggtttatacaatctcgatttttcaatagtgcaacctgtggaagcaaaaaaaaaaaaaaaaaaaaaaaaaaaaaaaaaaaaaaaaaaaaaaaanantaaaa

SEQ ID NO: 635 - DNA, 326 bp, Homo sapiens
aaacagaaagtagttttattttttctaaataggattttgatcacaaaaatgctggtgattcaaacctttaaaacagaagagcatacaacctaagaaaaatgcaaaacaggctacaaacctgtacatcatgttactgcactgaatactgtaggcaactgtaacataatggtatttgtatctaaacatagaaaaggtatagtaaaaatacagtattacaatcttatgagactgccaacatatacgtggtctgtcattgaccaaaacatcattatgtagtgcatgactattaaaattgtgcaaaacaaacccctgtatccatagtgttt

SEQ ID NO: 636 - DNA, 190 bp, Homo sapiens
aaatgaagtgattctaagatttggtttgggatcaataggaaagcatatgcagccaaccaagatgcaaatgttttgaaatgatatgaccaaaattttaagtaggaaagtcacccaaacacttctgctttcacttaagtgtctggcccgcaatactgtaggaacaagcatgatcttgttactgtgatatttt

SEQ ID NO: 637 - DNA, 84 bp, Homo sapiens
  misc_feature 63: n = A,T,C or G
acatcacctaaaaaaggaaactgggtcctacggcttggactttccaaccctgacagacccganagacaaaacaactggttcttg

SEQ ID NO: 638 - DNA, 413 bp, Homo sapiens
  misc_feature 40, 179, 192, 211, 323, 338, 343, 367, 379, 380, 407: n = A,T,C or G
ctgcaaacaccctgggccagaatttcttaaaacagctacntgacaaaaacaatgctattgacatccaataatgctaaagcctgggtaccacccaggctccactgactgtggtttccaaacatctctccactgactgtggttttcaaccacaaggaaaggaaaatggaatattctttggntcttccagcctanacacaactcctgacctaanacattgagtggagagtcctaaccctttggaagttgaactttctgctttcttcctgggactttggaactgagtttgaacaaaggacctgccatcatgctgcccatggattttnggttaacccttgganaaatnttgtcctccttttctgacaaactntttttggacctnnggcgcgaccccccttaggggggaattncccccc

SEQ ID NO: 639 - DNA, 356 bp, Homo sapiens
  misc_feature 250, 310, 315, 319, 325, 327: n = A,T,C or G
cgaggtcctgggctcgcctggaccacaagtttgacctgatgtatgccaagcgtgcctttgttcactggtacgtgggtgaggggatggaggaaggcgagttttcagaggcccgtgaggacatggctgcccttgagaaggattatgaggaggttggagcagatagtgctgacggagaggatgagggtgaagagtattaacctgtgtgctgtacttttacactcctttgcttggaactgcttattttgtctgnaatgctattgccgtaaattgttataaattgatgtttcattttacctgcccggcggccctncaaanggcnaattcnancaccttggcgcgtactaatggatccaact

SEQ ID NO: 640 - DNA, 162 bp, Homo sapiens
aaccacaaagctttacatcttcattttgactgttccatagcagaataaagcacttgaaaggaaacaagactccctttcacacatggattattataagtttcaatcctggtatctgtgcttgatttttatcagttttgtgtagatttttatgtttcatatttt

SEQ ID NO: 641 - DNA, 543 bp, Homo sapiens
  misc_feature 243, 286, 393, 395, 430, 440, 459, 466, 476, 485, 501, 515,528, 533, 539: n = A,T,C or G
tccctctgtggaagatattcaaaagccacaagtggtgcaaatgtttatggtttttatttttcaatttttattttggttttcttacaaaggttgacattttccataacaggtgtaagagtgttgaaaaaaaaattcaaatttttgggggagcgggggaaggagttaatgaaactgtattgcacaatgctctgatcaatccttctttttctcttttgcccacaatttaagcaagtagatgtgcanaaaaaatggaaggattcagctttcagttaaaaaagaaaaaaanaaattggcaaagagaaagtttttcaaattctttcttttttaattaaaatggagttcatttatttgaaacaaactggggccaatggtccccaaaaaattcctggtcancnccccccatttccaaaggggccaattttcaaggaanggcaggcctnaaggcttatttggtttggnattcaangatggctttncccattcanttgcttttttaaacancctttttcaaaaanaaggacttggccngaacncccttngggg

SEQ ID NO: 642 - DNA, 417 bp, Homo sapiens
  misc_feature 239, 345, 358, 364, 375, 393, 394, 401: n = A,T,C or G
aaacaagactccagtatgtgaaggttaattgctgtgctccacagatcttgtctattggcccctgtagaaagttaacctttgttgttttccttttataatttgcttattgcacaattgctttagggtaagtgaattatattaagatgccttgaaattatagcactccttgattaagaagctaaaatgtttctctcatttactccttaaacaaaagacttaaattagtttgggtcattatnctttatttgcagcatttggtttgtattagcgtaagagcaagtataggatatggagaggccctgctcatgaaacaaaggaggcccaggtataatacagtttctcctncctcttacttttntcccanttttccctgtngttcctttcccaattgtnnattcctnctggcccccaagggaa

SEQ ID NO: 643 - DNA, 565 bp, Homo sapiens
  misc_feature 436, 480, 483, 485, 502, 509, 512, 534, 543, 556: n = A,T,C or G
aaatttcagagatattaagcagagagagagtgaaaaagtaacctttgttgttttatccaattttgcaagttatgtatagagttagtaatgtttaaacgaaagggacttaagccctgcctagctctgacaatggcaggaaaagaaaactcacaggtaactaaacatttatctagtaaggcatagaacaaattatattaagatagatagatgaaacattattcaatgattacttatgcctttgtatataggcctggtccagcgtcacatgaaagcagttcattttgactgtcatcttctcccaggtctgaagatggaactttggtcaacttgaatttgatgccagatatcaatattgactattaagatcagtaggcgtcaggattccctttcagatgagatacatgtcccaggagtcaaagccctgcaacttacaccncaagggtagttaatacatttcataaagaccttttttaagtgggntananggagctctcactgatgntaacatnagntgggggggggaactgagttatnattgtgganactcccgcggcgnctaagggaa

SEQ ID NO: 644 - DNA, 331 bp, Homo sapiens
  misc_feature 279, 284, 320, 327: n = A,T,C or G
ccaccccggagatgacacgaggctcacatgactctagacacttggtggaaagtgaggcgagaaaaacaatgacttgggccaattacacgactgcaaagctagagctgccaacagggctccagggagcttggcttctgtagaagttctaaggaagcggtacgaactccacggcggtggggcgctaactagcagggacccctgcaagtgttggtcgggggcctcgagctgcctgagctgacacacctgcccgggcggccgctcgaagggcgaattccaccnccctngggggcgttactagtggatccgagctcggtaccaanctttggngaaa

SEQ ID NO: 645 - DNA, 333 bp, Homo sapiens
  misc_feature 168, 190, 199, 280, 292, 312, 317, 320, 326: n = A,T,C or G
cgaggtaaaaagaaaggccttacatatttattactgaatccagccaaccaacgtgttcataacagattcagagaggaaaacacgtcgaaatctccagatagtggtgacattttcagcttgatatggtaacatgatcgtgaccttcaaacagcataaatatgtgtgccntctcatgtgcaattccttatanacccagctnggttcttctccaatgtctccttttggagttgtacctgattttactaccaggtttcatctgaatcccctgggggatgggacnattttgcttttnttttttggacctgcccgggnggccnttnaagggnaaattcc

SEQ ID NO: 646 - DNA, 326 bp, Homo sapiens
  misc_feature 261, 264, 280: n = A,T,C or G
ccgagaactattcctggcactttttcgaaagtttgatgagagatgccagccccgctctttccttcgtgacctggtggagaccacccacctcttcctcaaaatgttggagcgattctgtcggagccgtgggaacctggtggtgcagaacaaacaaaagaagagaaggaagaagaagaagaaggtcctagaccaggccattgtttctggtaatgtcccatctagcccagaagaagtggaggctgtgtggacctgcccggccgnaangggcaaattccacccnccttggccgccgttactagtggatccgagctcggtaccaagcttgg

SEQ ID NO: 647 - DNA, 271 bp, Homo sapiens
gaagtgcattgggcttcaatctctgaacactgtagacccattagaagactgttccgattgttacaaattgtagtgcctgaaaacactcttaagctgattgtcttaacaaaatgaaagttctccaaagacaaaacagaacaattattataacaaaataattatggttgaaatgtctgtggttccttggaaatgctgcgctctttgtgtttttccatcattagtgcagttggaatgaatgtgtataggtcagaggtcctcgtgttcacatttt

SEQ ID NO: 648 - DNA, 370 bp, Homo sapiens
  misc_feature 268, 312, 363: n = A,T,C or G
aaaatgcaaagaaaattaactttcaatgatatgttcagggactggcactaaaaaaaattttcagactgcaaatgagttatacaaatgaaaatatcaaatggagatccagttatcaaaatgaaagcactcaacatattaaaagttcacaagtatttgtattgagcacattacaaaagtcagcttgctaactgttgtgattttaaagaactattgcagaagtctgaagaaaatagatttattagttaacttataaagagattaaagaggntgaacaggttttaaaagaaaattggggcttttttaaaaaggtanggttttaaatttcccattttgaaaaaataatggtggtggtttggttttttntaaaaaa

SEQ ID NO: 649 - DNA, 480 bp, Homo sapiens
  misc_feature 58, 104, 149, 152, 192, 197, 208, 235, 261, 296, 299, 406,409, 448, 468, 469, 470: n = A,T,C or G
ccacggggactgttattcgcaagctggttttctagaacctgttagctggaagcatggngagcaccatttctggacgctcaggccgtgtcgggctttcagtcatntccaccacacaggtacagcagcgctttttggtagtcgcccttagngtnttgctggatataatagtacagggacttgccgtactttttnttganttcaaacctanttttcaacatgtccacttcactgcggnaaaccatgattttgatcaggaccttntttcgcgtccccttgcccttcatggagtcatacanccnatcagcaaaatacagggcttggttctgaatgcactgaaccaggttcaggaaagcatttcccaggctcctttaacctctttcctgatcttttccaacatggtcataanggntggaactctttgtacctattaacttgccccggggggcgnttccaaagggggggaaattnnncccccccccc

SEQ ID NO: 650 - DNA, 405 bp, Homo sapiens
  misc_feature 280, 317, 343, 383, 388: n = A,T,C or G
aaaaaattagttgctttttatacagctatacaaagttcttaatgtttctttggcaatggaatataatggaattttacaactatataaaaaagttacctttgcctaagaaacagtatttactgtgtgtacatagttgactgacaaaattctctaccatccagcaccctaattaattgacgaaataagctacctcatattacaggattccccaaaagaaaggaggaaaaagacacacacatacacacacacacacacacacacacacacacacacaaccttntgtggctcaaaacacagtatcacggccctatctgcangcaacttgcaattgcacctcgcccgngaccactctagggcgaattccagcacactgcggcgtctangatcnactcgtccaacttggga

SEQ ID NO: 651 - DNA, 638 bp, Homo sapiens
  misc_feature 254, 420, 482, 489, 504, 522, 528, 533, 535, 571, 589, 624: n = A,T,C or G
caagatggctgtcttcgccttagtactcgtgtgaagttggcagggacggttcctgtcatcttcttgggcttatttggtgtgctgttgaaggggggagactagagaaatggcagggaacctcttatccggggcaggtaggcgcctgtgggactgggtgcctctggcgtgcagaagcttctctcttggtgtgcctagattgatcggtataaggctcactctcccgccccccaaagtggttgatcgttgggaacganaaaagggccatgttcggagtgtatgacaacatcgggatcctgggaaactttgaaaagcaccccaaagaactgatcaggggggcccatatggctttcgaggttggaaagggaatgaattgcaccgttgtatccgaaagaggaaaatggttggaagaagaatgttcgntgatgacctgcacaaccttaataacgcatccgcttatctctacaaacacttttaaccgaccntgggaangtttccaatagaaanaaaaaaacttgaaaaacnttcggnaaaangnttcatcttttcccccttgaaaaaagggaaacttgtnctttttccctgggaaggnaaaccggttttggaatttttctcttggaaaaaaantgggggtttttttt

SEQ ID NO: 652 - DNA, 433 bp, Homo sapiens
  misc_feature 369, 376, 404: n = A,T,C or G
aaaattttagaagttaagacttacgactacctcagtatatgccattcctaatagaaggaggtatgacggtttcaaactcgtgcagagctgcattttcatttacaagtctctgtaggcactttagaagtgaagcttggcttcaaagtacaaacactgggggctttggctcaaccttttaatataaaaaaattcactgatgtacaaaaatttgaaagtgtgacaatgacaattatgaaatcctgtgactgaaagtcccctcgagtgcactctgtgggtgcacatgcgcccgccacacaaactctggcatggaaacataaactaatgcaaaccatgctcccagaacccacacgtgtgtctcattccccaatncagacanactcgcggaccctagggaatcaccactncgcgtctaggtcactcgacactgggtatg

SEQ ID NO: 653 - DNA, 566 bp, Homo sapiens
  misc_feature 465, 474, 484, 485, 516, 522, 540, 541, 542, 550, 565: n = A,T,C or G
ccataaacacagaagatggttttggctttacattgacacatttctgtgtgtcaatgtagaagagaaaagaagtttaattataccttttaagcaggcaaaccattataataaactgctttagaaattactttaaaattatacacgtttggaacaacagattttttaaaaaatgaagtttggtgttatgtcagcattttaactatttttgctatagcgaggcctcctcatatattatcataatttatcatagtttaaatagtgaatcatattctgatattctgattaataatcatattaattttgacaatgattttagtttttgaagttttagactgcatcttaaaaaaggccataatctctttaaatacctcatcatagaatattaacttttaataaaaggttattttgatattggaataaggacatggtaccaatatctgttttacctggaagcatgaaaatgtnttaaaaggnaaataaaaannccaaagtagtgttttacctcggccgcgaccnccctanggggaattcccccccccnnngggcgttnctatggatccaactng

SEQ ID NO: 654 - DNA, 234 bp, Homo sapiens; identical to SEQ ID NO: 397

SEQ ID NO: 655 - DNA, 169 bp, Homo sapiens
aaaaccctgaaaatatttaatacagaataaaaacaataagctcaaagtacatgtttcactataatagacaccatattcatgaacctgggtttggttttggcaacacataatttttggtttaaaagtgaacaatgaaaacggatgtttcacattcaatatcctagtcttt

SEQ ID NO: 656 - DNA, 601 bp, Homo sapiens
  misc_feature 495, 504, 509, 517, 535, 540, 544, 546, 593: n = A,T,C or G
tctggatcttccaaaatatacagaaaaagaaactctacgctctaaactgatccaagctattgatcacaatgaaggcttcagtttaatataactttggagttataactattcagtttagtgcaaaagcattaaactatttgtgtttttcttgtggtgatgaattcagcaaggtgacagaggtactattataattcttacttgcagaatgttcaatctacgagtgttcatggaagccaaaaaatattaaaggaaaatgaacaaactgttaatattattgtacagaaccatggattttttttgaccatcttctaataaacatagcaagtattatgaatacattaaagttttactaacatgaattttaagagtttgcatatttcaaaaatgatctggtgtgagtgcatggaaatattgcttaatttttcttcaatcattgagtgaaaaacctttaactttggcctgcaatagcatttgatattttttcattttgtaaanaaaggtaantttgnaataaaanattattttttgataccantccantttntntggtgtaattgacttgaacaaaatttactttggcgggaacccccttnggggaaat

SEQ ID NO: 657 - DNA, 224 bp, Homo sapiens
ccatctatacaccattcttaccacacaattgacaaatgatgaactttctgagaaggtgaaaaactatagcaacctccttgctttctgtaggagaattgaacagcactattttgaagatcgtggtaaaggcaggctgtcatagagttatgtgttagtctcaggagtcttaacttttgaaatatgttttacttgaatgttacattagatattggtgtcagaatttt

SEQ ID NO: 658 - DNA, 296 bp, Homo sapiens
  misc_feature 218, 229, 235, 263, 265, 271, 286, 289: n = A,T,C or G
ccatggaagaagggcaggcatatggagtatgaatgcccctacttggtatatgtgcccgtggtcgccttccgcttggagcccaaggatgggaaaggtgtgtttgcagtggatggggaattgatggttagcgaggccgtgcagggccaggtgcacccaaactacttctggatggtcagcggttgcgtggagcccccgcccaaacctcggccgcaaccacnctaagggcaanttccancacccttggcgcgttactagtggatccnanctccgnacccaactttggggnaanatggggg

SEQ ID NO: 659 - DNA, 532 bp, Homo sapiens
  misc_feature 425, 434, 507, 514: n = A,T,C or G
gcccaaacatctccttgcatttttgttggctgaattgggtacaagtggttctatagatggtaataaccaacttgtaatcaaaggaagattccaacagaaacagatagaaaatgtcttgagaagatatatcaaggaatatgtcacttgtcacacatgccgatcaccggacacaatcctgcagaaggacacacgactctatttcctacagtgcgaaacttgtcattctagatgttctgttgccagtatcaaaaccggcttccaggctgtcacgggcaagcgagcacagctccgtgccaaagctaactaatttgctaatcactgattttgcaaacttgttgtggagatgtggcttggacaggtttgccatcagaagtggatatccgttgtattaaaaacaagataaaaaactgccaagatttttggcnagtggtggnctgaatccttgcaagaccttatgctcaactgttgacatctcttgctcttaccctgtaaaaaactgaaatgggnaagaggnttttactcgcggacccta

SEQ ID NO: 660 - DNA, 626 bp, Homo sapiens
  misc_feature 432, 498, 531, 534, 548, 566, 572, 580, 593, 601, 611, 612,617, 622: n = A,T,C or G
aaattcttgcattacacttttctttttaaaccaatcttccaggagattaatcaatgaaatttataagttttatcaacgtataaaatttttttcatcttctgggactcatagaatacaatctgtgtttctgaccagttgaggtagttaaaatagggagggcttttctaatttcgtatttgactatttcagaaagaaaggttatcttttactggtgagcacagtcattgctctgcagatgggctaggattcaaagaatataacacagtgttgttatcataaagagtgttgaagtttatttattatagcaccattgagacattttgaaattggaattggtaaaaaaataaaacaaaaagcatttgaattgtatttggtggaacagcaaaaaaagagaagtatcatttttctttgtcaaattatactgttccaacntttggaaataaataactggaattttgtcggcacttgcactggttgacaagattagacaagaggacncctatggagtaaatttttttggtgggatttcanatnagtccgttataaangaaacaggccacgtcccnccaatnttgtaggnctgcccggggccnaagggaantccccccctnnggggnttttngcca

SEQ ID NO: 661 - DNA, 344 bp, Homo sapiens
  misc_feature 304, 314, 320, 338: n = A,T,C or G
gaaggccttcgataggcactgcaacatggtgctggagaacgtgaaggagatgtggactgaggtacccaagagtggcaagggcaagaagaagtccaagccagtcaacaaagaccgctacatctccaagatgttcctgcgcggggactcagtcatcgtggtcctgcggaacccgctcatcgccggcaagtaggggccgctgtctgttgacagaactcactcctctgtcctatgaagaccgctgccattggtgttgagaataataaagctctgtgtttttttctaaaaaaaaaaaaaaaaaaaaaancctttggccnggaacnccttttgggggaattccnccccct

SEQ ID NO: 662 - DNA, 545 bp, Homo sapiens
  misc_feature 332, 344, 346, 386, 418, 427, 431, 444, 476, 494, 498, 508: n = A,T,C or G
ccggacatcccaacgcatgctcctggagctcacagccttctgtggtgtcatttctgaaacaagggcgtggatccctcaaccaagaagaatgtttatgtcttcaagtgacctgtactgcttggggactattggagaaaataaggtggagtcctacttgtttaaaaaatatgtatctaagaatgttctagggcactctgggaacctataaaggcaggtatttcgggccctcctcttcaggaatcttcctgaagacatggcccagtcgaagcccaggatggcttttgctgcggccccgtggggtaggagggacagaagagacagggaagagtcancctcccattcanangcatcacaagtaatggcacaatttcttcggatacttgcanaaaatatggtttgtagttcaacactcaagacnaacttattnttangataactcttaangcaacttattcatcctcactttgcctcttacncatgtaaaagattatttnaacngaggagatgntgtggacctccgctggacctaaataccttgtactact

SEQ ID NO: 663 - DNA, 493 bp, Homo sapiens
  misc_feature 362, 371, 381, 409, 466, 469, 476: n = A,T,C or G
ccactgcagcaccattggcaagagctaaaagctggacacaagccggatggcccgcggctggggagggtcaaatgaactacaatccatccacatgaaaactgggcgctgctacaggaaggaggctccttgtgtgccatcagggagaggccttggcgccagctccctaggaaggcaggctgccaggcagtatgtccagaaggagctcactctggtgaaaacaacaaacaagccatcaacactggctgtgcaggcaaaggcgcagagtccagaaggaatagtcctgactgttagcagagctaacagtctttcctgctctctgtccatctgtgtgtccttccattcatccatctcttctgctgganacacttcangggcgcactnatgtggggggggggggctttcaccttgnattttatatctttggactgctttgttcacactaaacatcaaccctttactcggccgnganccccttngggggaattcccccccc

SEQ ID NO: 664 - DNA, 329 bp, Homo sapiens
aaagttgtgagtttttattcaattttttgaggcctcttatttcctgaggctacatttttaagtattaaaagttaggcaactacaaccaaggaacttggtcatttgttatttgtaccaaatgttcacaaacttattcgggcgtggtggtgcctgtttgcaatcccacctattggagaagctggggcgggagagtctcttgactctagaagacggaggttgcagtgatccgagatcgcgccactgccctccagtcagagtggcagagactcctggggcgggagagtctcttgactctagaagacggaggttgtagtgatccgagatcgcgc

SEQ ID NO: 665 - DNA, 364 bp, Homo sapiens
ccagtttggtgtcggtttctattccgccttccttgtagcagataaggttattgtcacttcaaaacacaacaacgatacccagcacatctgggagtctgactccaatgaattttctgtaattgctgacccaagaggaaacactctaggacggggaacgacaattacccttgtcttaaaagaagaagcatctgattaccttgaattggatacaattaaaaatctcgtcaaaaaatattcacagttcataaactttcctatttatgtatggagcagcaagactgaaactgttgaggagcccatggaggaagaagaacagccaaagaagagaaagaagaatctgatgatgaagctgcagtagagaaaa

SEQ ID NO: 666 - DNA, 173 bp, Homo sapiens
gtgctgtgccacctggtgccgacaagaaagccgaggctggggctgggtcagcaaccgaattccagtttagaggcggatttggtcgtggacgtggtcagccacctcagtaaaattggagaggattcttttgcattgaataaacttacagccagaaaaaaaaaaaaaaaaaaaaa

SEQ ID NO: 667 - DNA, 200 bp, Homo sapiens
  misc_feature 188, 195, 197: n = A,T,C or G
aaaaaaattcccccctttaattgaccaaagtaaagccatgacatttcatttggtaacctgtttagaattataaaaatcatttcatttggcccagcccatactgcccaagacaaaacttccagacaattctgatgccatccagttttgttcttacaaactgcatattaaaaaaaaaaaaaaaaaaaaanttttcancnccc

SEQ ID NO: 668 - DNA, 235 bp, Homo sapiens
ctgtcaacgaaggcttgaaccaacctacggatgactcgtgctttgacccctacacagtttcccattatgccgttggagatgagtgggaacgaatgtctgaatcaggctttaaactgttgtgccagtgcttaggctttggaagtggtcatttcagatgtgattcatctagatggtgccatgacaatggtgtgaactacaagattggagagaagtgggaccgtcagggagaaaatgg

SEQ ID NO: 669 - DNA, 520 bp, Homo sapiens
  misc_feature 511: n = A,T,C or G
aaagcgggagatacatgaggtgggaagcttgttacaggagccggaaacaaaggcagtaaattattttgtgacatgtcttagattttgaggaaaaccggaattgcaacttaggttttatctactttaggaccttgcagcagcatggcaaaggagacaggatcttacaggactttacaaagtatgtttacaaggaatctgaattgggagtgtagataaggtccactggtcacagaaaaatgagcagttaacattcctttattttagtttcaggggcgggggaagggagagagggagagaagatacagggaaacttacagcaaatttttcactgtttatagctttcttggggaagaaaacacatgcacgaatcctggtgttaggaatattttaagcgtatatcttcaatattattcatccaggactgaagtaagtcctgatgcaggaaatgaatgagtttcacagctttctgacccctcttgcccaggaacccagactgccgggcgggcgctcnaaaggggaa

SEQ ID NO: 670 - DNA, 363 bp, Homo sapiens
  misc_feature 341, 347, 358: n = A,T,C or G
aaaattatctacactgaggttacataactttggtaaaagttccaaagttcactaatatattcctagggggcactaaaaaaatctacaactttatttaaataattttcaaggctacttactttcttcattgcattcactctccacgaattcataaaatatgcatggacacctatcgattcaaagtacaccataaacttactgtaaaaatccagtattacttaaaacatctctactatcattcaaatggtttaatctgacttaatgggcagtttgctcaagtgaaccacctgctgctcacttaattctcttcacattaatcttaatttacctgcccgggcggncgctcnaaaaggggaanttccc

SEQ ID NO: 671 - DNA, 153 bp, Homo sapiens
  misc_feature 140, 146, 148: n = A,T,C or G
cctgcttcacttgcagataagtttattataattctccagaaatgtgtaggatgtgcattagcaaattgcactgtacttttcactccagcctgggtgacagagcaagactcccgtctcgggggcttaaaaaaaaaaaaaangctgtntntaaat

SEQ ID NO: 672 - DNA, 725 bp, Homo sapiens
  misc_feature 469, 477, 481, 486, 507, 528, 575, 583, 592, 595, 604, 605,606, 618, 655, 660, 686, 688, 689, 707, 716, 718: n = A,T,C or G
ccaactatgcctctcagaacatcacctaccactgcaagaacagcattgcatacatggatgaggagactggcaacctgaaaaaggctgtcattctacagggctctaatgatgttgaacttgttgctgagggcaacagcaggttcacttacactgttcttgtagatggctgctctaaaaagacaaatgaatggggaaagacaatcattgaatacaaaacaaataagccatcacgcctgcccttccttgatattgcacctttggacatcggcggtgctgaccaggaattctttgtggacattggcccagtctgtttcaaataaatgaactcaatctaaattaaaaaagaaagaaatttgaaaaactttctctttgccatttcttcttcttcttttttaactgaaagctgaatccttccatttcttcttgccatctacttgctttaaattgtgggcaaaagaaaaaaaagaanggattgantcanaacanttgtgccaatacaagtttcanttaacttcctttcccccgctncccccaaaaaatttgaaattttttttttaacccctttttaccccccntttttggnaaaaaggtnaanccttttgtnnnaaaaaccccaantaaaaaattgaaaaaaaaaaaacccttaaaaattttnccccnccttgggggttttgaaaattttcccncnnagggaagttcccttggcnggacccccntngggggaa

SEQ ID NO: 673 - DNA, 363 bp, Homo sapiens
aaacatctcacatatacaaaataggtacaatttaatttttctgcttgcccaagaaacaaagcttctgtggaaccatggaagaagatgaaaatgagactggcaaagaacaaatgctgaatctgaagaagaggacaactttgggcaaataatctgcatacttttaattgggaataagatggaaaatatgaatgctaaatcaaattttttaaaaaatacaccacacgatacaactcaatacaggagtatttcttctcaaattcttctagcaccatcaacattcttcaagtatctgaaatactattaattagcacctttgtattatgaacaaaacaaaacaaggacctcagttcatccctgtctagg

SEQ ID NO: 674 - DNA, 295 bp, Homo sapiens
ggcaggtccctggactagtgcagtccttgccctcagccccagaccagagatgggtggtatatgccatgtggggtgggtgatgtcagtagataaaagtgtgagagaaggggtctccagggaagagtcacaggctgttggacacagcctgggtggcagagggcagggtcatcaccctctagcatcagtgcctgctcctgcctgccctggccctgaggctccaccacttcttcctccacccaggacctaatgtacgtgtgttttgttttttgttttttacctcggcccgcgaccacgc

SEQ ID NO: 675 - DNA, 360 bp, Homo sapiens
  misc_feature 299, 311, 323: n = A,T,C or G
aaaaaccatacatcctttttattgttaagtcataaagaggtatcaaaattaaaagcaaaaattacagggtaagacttaacaaaactactaggagcgtcaaaggaagtgaaaatgggactaggcgcggggcaatatgaattaatgaacatgggaaggacaaggatggggagaacagtgagcatgtgctgaagatactaggggagaggatctggtgaaaaatttgatcttagacaagcgcctaggtaaagaaataatgggataagatttcacctcggcccgcgaccacgcttaaggggaanttcccccccccntggggcgcgttnctagtggatccgagctcggtaccaagcttggcggaat

SEQ ID NO: 676 - DNA, 208 bp, Homo sapiens
ccatgtgtgtcaaagtcagggaatccctcctcctgggagccaagaggaagtctctcaaaactagaagggaaaggtgttttctccacatcaatccagctttggagacattctattagtgacatatgccccttcccccaaaaacaacaatgaagtgttctgtgtgctaacaacatagcttttaaaaaaaaaaaaagtaaaacaaaatttt

SEQ ID NO: 677 - DNA, 496 bp, Homo sapiens
  misc_feature 176, 362, 439, 450, 453, 470, 482: n = A,T,C or G
ataactgtcaacctgacacccgagctggctcaggtgaacgagtactgagaggagagaatgtacgtttgctttacccaccgccaccaagaaagcagtccgatgagattttttttttggaggggggagggtctacacagcaagagaacagaaatattgtgtctcatgaaggatcacanagttcagggggaaaatgtgacagcacacgcacaaacgccttcactggatcagccgctggaactgagggagtgagcttggggacttccttcgtcagcactggctttctgttttcacaagacagacgtctgtcccgctgctctctccccatctcctaccccacatcctgtcttagccgcagtctccanacccatgatgaactgtgatctgccgtggcctgccgtggtcctgccgtggacctgtccctaccatgaccttggacctnttgccttcaancanaggaaacccccaggganactcgccggacnccttaggggaatcc

SEQ ID NO: 678 - DNA, 570 bp, Homo sapiens
  misc_feature 427, 481, 525, 549, 550, 559: n = A,T,C or G
gtagctggcggtcccgggtgctgctggttagtgtgctctgggggagggtccgagccagccgctgttttgccggaggagcccctcaggccgtagtaagcattaataatgtctttcatctttgagtggatctacaatggcttcagcagtgtgctccagttcctaggactgtacaagaaatctggaaaacttgtattcttaggtttggataatgcaggcaaaaccactcttcttcacatgctcaaagatgacagattgggccaacatgttccaacactacatccgacatcagaagagctaacaattgctggaatgacctttacaacttttgatcttggtgggcacgagcaagcacgtcgcgtttggaaaaattatctcccagcaattaaatggggattgtctttctggtggactgtgcagatcattctcncctcgtggaatccaaagttgaacttaatgctttaatgactgatgaaacaatatncaatgtgccaatccttatcttgggtaacaaaaatgacagaacanatccatcatgaaaaaaaactcccnnaaaaatttnggtttttggac

SEQ ID NO: 679 - DNA, 522 bp, Homo sapiens
  misc_feature 459, 505, 512: n = A,T,C or G
aaaagaatttttgctttctttctctctaaattttccttccgtgctttgatgcgggctcgtttctcacgttccagtctgagaaaatggtccacataaggcaaggcaaagaatcgtttcctattgtatcttttatttaggtgccaaggtataacccactgcttgaacttgtgccagatgattcttccaaagatgtctcttctccaagcaccaggtctagctctttcttgaccagtctgaagaagccttagggcatcttctctttcctggacaactttatctaatgcatccatggaatctactaccttatctaaccgctctggacttggcattggcaatctctgccgcttggcctcctgctctagggttagaagcatgtttctttctttcagtaagacataccaaaagtttgtgtaaatcttcattacttttttccttattgctgacaggtccatgctgctncagaatttactttttcttgcccccagttttttgggcatcaaaaaancctgccngcggccgtct

SEQ ID NO: 680 - DNA, 438 bp, Homo sapiens
  misc_feature 47, 52, 55, 60, 65, 72, 80, 88, 124, 193, 308, 346, 377, 420: n = A,T,C or G
caggaagatggtggcccgcaaagaaaacgaaaaagtcgctggggtcnatcanctntaggntccanctcgttntgaaaagngggaagtncgtcctggggtacaagcagactctgaagatgatcanacaaggcaaagcgaaattggtcattctcgctaacaactgcccagctttgaggaaatctgaaatagagtnctatgctatgttggctaaaactggtgtccatcactacagtggcaataatattgaactgggcacagcatgcggaaaatactacagagtgtgcacactggctatcattgatccaggngactctacatcattagaagcatgccaaaacaaactggngaaaagtaaaccttttccctacaaaatttcncctgcaaccttaaacctgcaaaattttcctttaataaaatttnttgtttacctcggcggga

SEQ ID NO: 681 - DNA, 182 bp, Homo sapiens
gggggacgtcagagaaacggcgtcatgcccagccacttcagccgaggctccaagagtgtggcccgcccgggtcctccaagccctggaggggctgaaaatggtggaaaaggaccaagatggcggccgcaaactgacacctcagggacaaagagatctggacagaatcgccggacaggtggcag

SEQ ID NO: 682 - DNA, 427 bp, Homo sapiens
  misc_feature 405, 417: n = A,T,C or G
aaatgaaattacaaactacccctccttgtcaaaaatccacatgaagttgatattggtgtttataaatcactctctcccagtccctcactggttccaaccttcaggtgataaaaattaggatgggatccatcctccctgtgctgacagtctggggtccccgcatgtatgcacaaacccgcccagcgtgcgcacacacgttcagaagaaatcttcaaaggaaccgagcgtttggagaaagtggcaagtccacagaatcagaggttacgaacacaccttcaataatattaatacattcctgtctttaaattccttgccatgtttccatcaaagtagagcacacattgttttccagaacctgggggctcgacctgggtgggacaccaggatgcagacctcggccgcganccccttaagggngaaatttccc

SEQ ID NO: 683 - DNA, 419 bp, Homo sapiens
aaactttggtttgaaaattgcagttacaaaacccaaatgagaggacacggacaaaaaagtaacaaaaagacagatgccctgaatcagacacatcgctaacaagcaagagatgaggagattccatttggtgttattccggcatagagcaagcggcaggctttgatgcagaagcttattgtagaattgttaagtgattttagtcgacaggatcacatacaaatcatttacaagccacaattagtttattatttacataagacatttctctttaaccaggttaattgtttttcttaaaatggcatagactcctctggttagtagttttattatgcacctctttcaaaactgaggctcctcatggctgtgtgttggaacttttttaaaataatgtttttctacattattactgaaatgcatca

SEQ ID NO: 684 - DNA, 509 bp, Homo sapiens
  misc_feature 295, 372, 421, 429, 469, 478, 481, 497, 500: n = A,T,C or G
ccagccacggtaaccacgatgggtccatcgctggatgggaccagaaagtgaatacgccgaggcatagggttgtagcagaaaaagaggtttcatcgtagggtcaccgaaggaggaaatgggaggaaacgtcaaatccatctccctgaggagtttggggctggggtttttaagggtttgggagtggagactggagtgtgggagatggttgattggtcgaagtgtgcagggtgggagtcatgggaagagggagacgaaagctgtatttttcattgcttgaatcaccattcctcttgtnggggggtctttcaaaacttggtttggtggtccggcttgtttttgcttggaaaattcaaggaatcttgaaaaaaacantctttaaagccaagttcttttaaaccaaaaaaaatctttaatgaattcntaaatggncaagaaaaatcccccatcttattttttacccttgcccccngggcggggnccncttttaaaaaaggggnggnaaatttttt

SEQ ID NO: 685 - DNA, 445 bp, Homo sapiens
  misc_feature 375, 388, 393, 395, 404, 407, 421, 424, 435, 436: n = A,T,C or G
ccacctagcagggctcctctaaacacgcaactcagcgaggggacccccttcacctctggcaagagagctgggtagatcagaaacttggtgacacctggctagcacagagcaggctcacttgtcttggtcccactacccagattcctgcagacattgcaaaccaaatgaaggttgttgaatgacccctgtccccagccacttgttttgttatcatctgctctgcagtggaatgcctgtgtgtttgagttcactctgcatctgtatatttgagtatagaaaccgagtcaagtgatcatgtgcatccagacacactgtgtcacctgaccacagagcaaataccttaacaatctggaatgaaacttgtgaccagtgccnccctgggtggttntggananactgccgtnttntttttgaactcggncgngaacacccttnngggggaatt

SEQ ID NO: 686 - DNA, 332 bp, Homo sapiens
  misc_feature 152, 171, 250, 265, 284, 302, 304, 310, 315, 323, 328, 329: n = A,T,C or G
gtccttaggcaccagtctttgttaaacaaaaccctttggcactattgtggttttctattctctgtctgaactctattcaaaagtatctttgctctcttgggccttttcttttactgttttgttttttttttctaatcttgctttcatactanccagtgtggggaaaaggtncaatatgtcaaagagatgagagagtgttatttcttgggcaattttctattagtgtttcttattttggacctcggccgcnaccaccctaagggcnaattccaaccccactgggngcgttactagtggatccnanctcggnccaancttggggnaaaannggg

SEQ ID NO: 687 - DNA, 575 bp, Homo sapiens
  misc_feature 446, 458, 478, 503, 511, 518, 522, 547, 548, 558, 559, 568,571: n = A,T,C or G
ccaggaggggtctggctgggacatgccactctgggccatcagcttctggatccactcaaagtggtggctgatattggtgtagacaccgggccgattgggccgaccacagcccactccccagctcacgactccaatctgataccacagtccattcttgttacaggccaagggtccacctgagtcaccgaagcaggcatccttcccgccttgggcattgccagcacaaaccatgtctccaaagatgtccttgcggaaactgtacttgaggaagaggtggttgcacatagagttgtttatgatggcgacctgaacttcctggagggtgtggggagatggcaatgcctcatcctctttgatgtacccccagccagtcacccagcagtcttgtccggttctcaaacttaaatgtggaggccttggaaacagatgggcttggatgtgtttantgtaggtgacangtgcagacaacttcaccaangcaatgtcatagggtgaattcccangtagcganggctcanatanattttataccaataacgggtgtagnngactcggcgnnaccccttanggngaat

SEQ ID NO: 688 - DNA, 489 bp, Homo sapiens
  misc_feature 447, 487: n = A,T,C or G
cattaggccagcaacgcttgtagaactcactctgggctgtaacgtggcactggtaggttgggacaccagggaagaagatcaacgcctcactgaaacatggctgtgtttgcagcctgctctagtgggacagcccagagcctggctgcccatcatgtggccccacccaatcaagggaagaaggaggaatgctggactggaggcccctggagccagatgggaagagggtgacagcttcctttcctgtgtgtactctgtccagttcctttagaaaaaatggatgcccagaggactcccaaccctggcttggggtcaagaaacagccagcaagagttagaggccttagggcactgggctgttgttccattgaagccgactctggccctggcccttacttgcttctctagctctctaggacctcgggccgcgaccacgcttaagggcgaattncaacacactgggcgggccgttctaatgggatcccaacttngg

SEQ ID NO: 689 - DNA, 584 bp, Homo sapiens
  misc_feature 355, 408, 415, 465, 472, 508, 522, 546, 547, 556, 572: n = A,T,C or G
ctgttatttatgtggctcatgatgcttattgagcaatctgcaaaaatagatttcctgtctcacacaggacagggtagatttccagcaagcataatcaaaatctccaagtcttttggtcaaattagagctgccaccatgcacgaggttttacttaaaggtgtttactgatgaataaactcacacttctgtgaactggttcttgcttcttgtgcagctaactctttccacctctctttgttctgctgaatgatgtccaccaggttgttcttgaaactcttcaggtccactgctgcaagggagtagtctggggaataggacccatcactcatggagccttttgtatttgatcgcttantgcatcaacaatgtgtaaccccacaatggtgggttgagctgcttgccacatangaagaantttcggcttttgaaggtttcctcttttaaaaagaaataacaattttcttntgttgantcttgtcaaaaaaaaaaaaatgtttgggaaccttgncccgggcgggcccntttaaaaagggggaaaattccaanncacctgggnggggcggttacttaanggggaacccaaa

SEQ ID NO: 690 - DNA, 196 bp, Homo sapiens
  misc_feature 104, 144, 170: n = A,T,C or G
cctcggggcttatacaatgagcagtgggctctaccttccaacaggaagtgcaaactaattcgaagtcacacttcaccaggagggagagatggtcttggctgaangcactttaatcaagggaacaaacccaatgccggaatttgncttctcttacttttataaatctaaanaccacttttttggaaaaccaacactg

SEQ ID NO: 691 - DNA, 365 bp, Homo sapiens
aagaattcacttgagtcctatgccttcaacatgaaagcaactgttgaagatgagaaacttcaaggcaagattaacgatgaggacaaacagaagattctggacaagtgtaatgaaattatcaactggcttgataagaatcagactgccgagaaggaagaatttgaacatcaacagaaagagctggagaaagtttgcaaccccatcatcaccaagctgtaccagagtgcaggaggcatgccaggaggaatgcctgggggatttcctggtggtggagctcctccctctggtggtgcttcctcagggcccaccattgaagaggttgattaagccaaccaagtgtagatgtagcattgttccacacattt

SEQ ID NO: 692 - DNA, 293 bp, Homo sapiens
aaaatccctcaaaaactgtttattatacaagtgagttttgagtcacgatgggcttatcggtaggatttctggtagcgagcgcgggcaccaggacctccaaactttttggactcgcagcgacgagggtcagctaccagcagggtccggtcatactggatgaggatgtctttgatctccttcttggaagcctcatccacatatttctggtaataggccaccagggctttggagatggactgacggatagcataaatctgggccacgtgaccaccaccctttacacggacacggat

SEQ ID NO: 693 - DNA, 230 bp, Homo sapiens
cctgggtttggatttcagaatcctagctccgggctccactcgtgtggcagcaagactgcttcgttccagcgtttagaaacacacctgtatttgattctcagccaggggagcactcgctgcactggtgggaggcggttgggaaagttgcaggaaaaccttagtcttccatccttctgacccatggtggaaattcacaccatggatttttaatggatctttgttctaggcag

SEQ ID NO: 694 - DNA, 566 bp, Homo sapiens
  misc_feature 394, 499, 532: n = A,T,C or G
ctggtaccaaaacagagatatagaccaatggaacagaacagagccctcagaaataatgccgcatatctacaactatccaatctttgacaaacctgagtaaaacaagcaatggggaaaggattccctatttaataaatggtgctgggaaaactggctagccatatggagaaagctgaaactggatcccttccttacaccttatacaaaaattaattcaaatggattaaagacttacatgttagacctaaaaccataaaaacctagaagaaaacctaggcaataccattcaggacataggcatgggcaaggacttcatgtctaaaacaccaaaagcaatggcaacaaaagctaaaattgacaagtgggatctaattaaactaaagagcttcttgcncagcaaaagaaaccaccatcagagaacaggcaaccctacagaaaggggagaaaaatttttgcaacctacctcatcttgacaaaaggggttaatttcccgaaaatntaccattggaaacttcaaaccaaaatttttaanaaaaaaaaaaaaaaaaaaaccccctttaaaaaaa

SEQ ID NO: 695 - DNA, 169 bp, Homo sapiens
atttgacaaagaaaaatgatacttctctttttttgctgttccaccaaatacaattcaaatgctttctgttttatttttttaccaattccaatttcaaaatgtctcaatggtgctataataaataaacttcaacactctttatgataaaaaaaaaaaaaaaaaaaagttt

SEQ ID NO: 696 - DNA, 239 bp, Homo sapiens
aaacactgacatcctgtgaagatgccagtctttacaggcgtttgtaaaagtagactgtggggagtatgttacactaatacaaagttttacaaatgaatacaagtgaaatatataaattacaatgaaatagaggaagattgtggctctgtcctgggttggttcttttagcagtcatattgctgttggtgagagcagcaaaagccacatatgcctccaagcactccatttattacttgaat

SEQ ID NO: 697 - DNA, 205 bp, Homo sapiens
acctgctccagcatcactatcctgagccctaaagagtgtgaggtcttctaccctggcgtggtcaccaacaacatgatatgtgctggactggaccggggccaggacccttgccagagtgactctggaggccccctggcctgtgacgagaccctccaaggcatcctctcgtggggtgtttacccctgtggctctgcccagcatccag

SEQ ID NO: 698 - DNA, 595 bp, Homo sapiens
  misc_feature 384, 475, 477, 483, 507, 518, 551, 556, 582, 587, 588: n = A,T,C or G
ggcaggtgaagctgatggggtcaaatgaaggtgaattcaaggctgaaggaaatagcaaattcacctacacagttctggaggatggttgcacgaaacacactggggaatggagcaaaacagtctttgaatatcgaacacgcaaggctgtgagactacctattgtagatattgcaccctatgacattggtggtcctgatcaagaatttggtgtggacgttggccctgtttgctttttataaaccaaactctatctgaaatcccaacaaaaaaaatttaactccatatgtgttcctcttgttctaatcttgtcaaccagtgcaagtgaccgacaaaattccagttatttatttccaaaatgtttggaaacagtataatttgacaaanaaaaatgatacttctcttttttttgctgttccacccaatacaattcaaatgctttttggtttattttttaccaatttcaatttcaaaagtntnaatggnggtttaataaataacttcacactntttttgatacnaaaaaaaaaaaaaaaaaaaaatttttaaaactncgccnccccctgggggaatccccccgggggngttanngggacca

SEQ ID NO: 699 - DNA, 275 bp, Homo sapiens
ctgacccccaggataagcactggctggctgagcagcatcacatgcgggcaacagggggcaagatggcctacctcctcatcgaggaggacatccgggaccttgcggccagtgatgattacagaggatgcctggatctgaagctagaggaattgaaatcctttgtcctaccctcctggatggtggagaagatgagaaagtatatggagacactacggacagagaatgagcatcgtgctgttgaagcacctccacagacctgaggccgggtcccctgg

SEQ ID NO: 700 - DNA, 381 bp, Homo sapiens
  misc_feature 66, 201, 213, 225, 251, 255, 261, 262, 265, 280, 290, 303,313, 322, 339, 373: n = A,T,C or G
cagatgccgaggtggatggtgtggatgaagaggaggaggacgaagaaggagaagatgaggaagacnaggacgatgaggatggtgaagaagaggagtttgatgaagaagatgatgaagatgaagatgtagaaggggatgaggacgacgatgaagtcagtgaggaggaagaagaatttggacttgatgaagaagatgaagatnaggatgaggatnaagaagaggaanaaggtgggaaaggtgaaaagaggaanaaanaaaccnnatnattgaagggagaaanatgatttaanaacccccagattnacccttgcanaaaaccaanaaacttgtttcaaattnttttgggtttgggaccttgccttcaattgggganttttttgg

SEQ ID NO: 701 - DNA, 204 bp, Homo sapiens
  misc_feature 54, 79, 91, 117, 125, 138, 164, 174, 187, 194: n = A,T,C or G
gtgctatgtatggtgtgtgtgttgtgtatgtggtgtgtggtgtgtgtggtgcanggggcatgtgtgtggtgtatgctcntgtgtgtgctgngctcgtgtgtgtgctgtgttcatgcntgtgctgngtgttgtgtgtgngtactgcggggatcataaaatatgantgctttttangatgggaattganatgtaanatttgggggt

SEQ ID NO: 702 - DNA, 422 bp, Homo sapiens
  misc_feature 259, 264, 289, 336, 350, 359, 367, 375, 383, 388, 389, 397,402, 417: n = A,T,C or G
aaattaaagatgtctagttgctttttataagaccaagaaggagaaaatccgacaacctggaaagatttttgttttcactgcttgtatgatgtttcccattcatacacctataaatctctaacaagaggccctttgaactgccttgtgttctgtgagaaacaaatatttacttagaagtggaaagggactgattgagaatgttccattccaatgaaatgcattacaacttacaatgctgcttattggtgggagtactatnaagantcaaatttttctaacatatggaaangccttttgtcttccaaaaataatacctagggataatgggttaacttnggccggaacacccnttaagggcnaattccanacccttgncggccgtncttannggatcccnacttnggaccaactttgggngaaat

SEQ ID NO: 703 - DNA, 257 bp, Homo sapiens
ccatccttcagaagatcgacttccgctattggggagagtctgaggagtccgttctcccacggggcctcgtcactctttgcgaagggcgcctggcaggtcaaatgacctccatttccacctcgccttccaccttcttcttttgcttctccatcactgcctccagctctgacactttctctttgtcctccagcagcgagcgctgcacggtgacctggctgtacacacgtgccccctcctcggggctcaccgcccgcagc

SEQ ID NO: 704 - DNA, 226 bp, Homo sapiens
aaaatatgtttattttgtatgttttacaatgaatacttcagcaaagaaaataattataatttcaaaatgcaatccctggatttgataaatatcctttataatcgattacactaatcaatatctagaaatatacatagacaaagttagctaatgaataaaataagtaaaatgactacataaactcaatttcagggatgagggatcatgcatgatcagttaagtcact

SEQ ID NO: 705 - DNA, 465 bp, Homo sapiens
  misc_feature 336, 396, 406, 422, 435, 459: n = A,T,C or G
aaatcaagcacatccttgctaatttcaaaaactaccagttctttattggtgaaaacatgaatccagatggcatggttgctctattggactaccgtgaggatggtgtgaccccatatatgattttctttaaggatggtttagaaatggaaaaatgttaacaaatgtggcaattattttggatctatcacctgtcatcataactggcttctgcttgtcatccacacaacaccaggacttaagacaaatgggactgatgtcatcttgagctcttcatttattttgactgtgatttatttggagtggaggcattgtttttaagaaaaacatgtcatgtanggttgctaaaaataaaatgcatttaccttgcccggcggccgctcgaagggcgaattccancacactggcnggcggtctagtggatnccaactcggaccnaacttggcgtaatattggcataanttttcc

SEQ ID NO: 706 - DNA, 221 bp, Homo sapiens
ggcaggtcgcgcggccgtggaaggtcagcgccgtaatggcgttcttggcgtcgggaccctacctgacccatcagcaaaaggtgttgcggctttataagcgggcgctacgccacctcgagtcgtggtgcgtccagagagacaaataccgatactttgcttgtttgatgagagcccggtttgaagaacataagaatgaaaaggatatggcgaaggccacccag

SEQ ID NO: 707 - DNA, 144 bp, Homo sapiens
caacattcttcaagtatctgaaatactattaattagcacctttgtattatgaacaaaacaaaacaaggacctcagttcatctctgtctaggtcagcacctaacaatgtggatcacactcatgggaaagtgttttgaggtagttt

SEQ ID NO: 708 - DNA, 608 bp, Homo sapiens
  misc_feature 424, 505, 526, 527, 534, 551, 567, 606, 607: n = A,T,C or G
ctgtctgaacgtgcatgccatgcacgcctgtgcatttcttcccacgccagaaacaccaacgttagcagtgagaaacagcctcttgtagaggaatcgtcgttttgttatagatgttatagccacgtgtattctctctgatggacagctatagcagatcagcttatacttgtcctataattcattatatatcaaatggtgagcaaatcactagacagaacattccctgaaatagattttagtacagaggcctgaattcatgtccacaatgacctgtgcttaactattccaaaggtcgctaaagatactgttactactattgagatattattgggctacttcacgtttacatagtaaatgtttgcagcatataacattacagactcataaacccataattaacttataagtgttaatggacaactgngctttgatttttgcctttagtgataaaaaacaaagtaatgaaatgggtactcctcaaagcatggacaatttactttgctantagggaaaacaaaacaaaatnncaattcntgtggaaccgaacctcnaaatacacaaaattgnttaaaggccaaaggtgaccggactaacacatgaaccttnnt

SEQ ID NO: 709 - DNA, 378 bp, Homo sapiens
cggcgccgcgcccatagccggacggggatctgagctggcaggatgaatgtgggggtggcacacagcgaagtaaaccccaacacccgagtgatgaatagccgaggcatctggctggcctacatcatcttggtaggattgctgcatatggttctactcagcatccccttcttcagcattcctgttgtctggaccctgaccaacgtcatccataacctggctacgtatgtcttccttcatacggtgaaagggacaccctttgagactcctgaccaaggaaaggctcggctactgacacactgggagcaaatggactatgggctccagtttacctcttcccgcaagttcctcagcatctctcctattgtgctctatctcctg

SEQ ID NO: 710 - DNA, 275 bp, Homo sapiens
cacctgccgtgacctcaagatgtgccactctgactggaagagtggagagtactggattgaccccaaccaaggctgcaacctggatgccatcaaagtcttctgcaacatggagactggtgagacctgcgtgtaccccactcagcccagtgtggcccagaagaactggtacatcagcaagaaccccaaggacaagaggcatgtctggttcggcgagagcatgaccgatggattccagttcgagtatggcggccagggctccgaccctgccgatgtgg

SEQ ID NO: 711 - DNA, 173 bp, Homo sapiens
tgaaatcattgatgaccacagagctgggaaaattgttgtgaacctcacaggcaggctaaacaagtgtggggtgatcagccccagatttgacgtgcaactcaaagacctggaaaaatggcagaataatctgcttccatcccgccagtttggtttcattgtactgacaacctcag

SEQ ID NO: 712 - DNA, 195 bp, Homo sapiens
caggtaaaatatcacagtaacaagatcatgcttgttcctacagtattgcgggccagacacttaagtgaaagcagaagtgtttgggtgactttcctacttaaaattttggtcatatcatttcaaaacatttgcatcttggttggctgcatatgctttcctattgatcccaaaccaaatcttagaatcacttcattt

SEQ ID NO: 713 - DNA, 498 bp, Homo sapiens
  misc_feature 345, 427, 436, 467, 486, 489, 494: n = A,T,C or G
ctgctgaaacttgggcctctcctctggatctaaggcccagcaacaggccatcacagcaaataattcatcaggacagttgattggctgggctattcggtaaccatctttcaggtatgcggccatctcgaaggggtcaatgtccacgtagggagtctggcccagagtcatgagttcccacagcgtcactccaaaggcccacacatcactagcgctagagaactcgttattaaccagactttcaagagccatccaacgaactggcctgttttcattgtcccccagacagtgatagtccatggggaacaagtctctggagagggcattgtctgtgatcttaacttgaantgtgtcatcaatgacacagttcctggcaaccaggtctttgtggatgacttcccttctggacctcggccgcgaccacccttanggcgaattncacacactggcggccgtactaatggatccanctcggacccaacttggcgnaanatggnataa

SEQ ID NO: 714 - DNA, 248 bp, Homo sapiens
aaatccttgaggggtacagcatcactcggattctgtgtccaatggccttagcaggaagattgcttcggaatttggcacgaaccatgccactgtttccatgggcccgagttacttttccccagatgactctggttttgtttggtttgccgccaggagtgactgtgttgttctttgctttatatacataagcgcatctcttgcccaaatagaattctgtttcatctcgggcgtgaacaccttcaatttta

SEQ ID NO: 715 - DNA, 128 bp, Homo sapiens
gtacaaacgagtcctggccttgtctgtggagacggattacaccttcccacttgctgaaaaggtcaaggccttcttggctgatccatctgcctttgtggctgctgcccctgtggctgctgccaccacag

SEQ ID NO: 716 - DNA, 160 bp, Homo sapiens
ctgggccagggatctctgaatcctgggaaacttggaactctggaactcagcttgatcaaagagaaggttctttagctctcaggtggaagcaggtagactccattttctgagagagtagtgtcttcttcccagaagctggagaggtgagattggatctgct

SEQ ID NO: 717 - DNA, 115 bp, Homo sapiens
ctggtttagaaaagtttagtatgtgacgataaactagaaattacctttatattctagtattttcagcactccataaattctattacctaaatattgccacactattttgtgattt

SEQ ID NO: 718 - DNA, 302 bp, Homo sapiens
ggacgtacggtcctgctagtagaggaatatgtcgagtttctctagggcgccccagcaatgggccacttttgctagaatatggtatctcttagatgggaaaatgcagccacctggcaaacttgctgctatggcatctataagacttcagggattacataaacctgtgtaccatgcactgagtgactgtggggatcatgttgttataatgaacacaagacacattgcattttctggaaacaaatgggaacaaaaagtatactcttcgcatactggctacccaggtggatttagacaagtaacag

SEQ ID NO: 719 - DNA, 139 bp, Homo sapiens
ttttctttataattcacacatatatgcagagaagatatgttcttgttaacattgtatacaacatagccccaaatatagtaagatctatactagataatcctagatgaaatgttagagatgctatatgatacaactgtgg

SEQ ID NO: 720 - DNA, 328 bp, Homo sapiens
ccagacctgaggcccacagacctggtccccacaaccaggattcctacaatgtacacattcctaatccaggctcaactctcctttacccaaaagtaaatgcctcaggactcaatctgaatcactgtctgtctcagcttctttcacatccacgctgaatttgtactcctggtcacatcccatgtaagcgtcactcatgaagtacagagtgtagttgtgggcaccagtggctggggccacaaagtccaacttcaccttggccttctgctgcaaggtcagcctcttgatggagatgaggctattggacttggcatctccaatcaccacccac

SEQ ID NO: 721 - DNA, 201 bp, Homo sapiens
aaaatcacaacagttagcaagctgacttttgtaatgtgctcaatacaaatacttgtgaacttttaatatgttgagtgctttcattttgataactggatctccatttgatattttcatttgtataactcatttgcagtctgaaaattttttttagtgccagtccctgaacatatcattgaaagttaattttctttgcatttt

SEQ ID NO: 722 - DNA, 277 bp, Homo sapiens
cacaagcctcttctgaagatggaaggccttttgcccgttgaggtagaggggaaggaaatctcctcttttgtacccaatacttatgttgtattgttggtgcgaaagtaaaaacactacctcttttgagactttgcccagggtcctgtgcctggatgggggtgcaggcagccttgaccacggctgttcccctcacccaaaagaattatcatcccaacagccaagacccaacaggtgctgaactgtgcatcaaccaggaagagttctatccccaagctgg

SEQ ID NO: 723 - DNA, 343 bp, Homo sapiens
ctgattttatttccttctcaaaaaaagttatttacagaaggtatatatcaacaatctgacaggcagtgaacttgacatgattagctggcatgattttttcttttttttcccccaaacattgtttttgtggccttgaattttaagacaaatattctacacggcatattgcacaggatggatggcaaaaaaaagtttaaaaacaaaaacccttaacggaactgccttaaaaaggcagacgtcctagtgcctgtcatgttatattaaacatacatacacacaatctttttgcttattataatacagacttaaatgtacaaagatgttttcccttttttcaattttt

SEQ ID NO: 724 - DNA, 186 bp, Homo sapiens
aagagatctgaaaccagccatagtgaaagtctatgattactacgagacggatgagtttgcaattgctgagtacaatgctccttgcagcaaagatcttggaaatgcttgaagaccacaaggctgaaaagtgctttgctggagtcctgttctcagagctccacagaagacacgtgtttttgtatcttt

SEQ ID NO: 725 - DNA, 343 bp, Homo sapiens
  misc_feature 323: n = A,T,C or G
aaataaatacttagaacacgacttggctcctacaagcatctggactctaggtctcagtactggagtgtctcacccatgggccccacgcagggacgccacggttccctcccaccccgtgatcaagacacggaatcggctgccgatggttggatcgcaatgcgccccttttctagagccttccccggccatctacaggcaggatgcggctgggaaaaagacaactggaatttctcgaaggttgatggtccgcacggttgaggattctacgtggttctcttggttcccctggtgtgtgtgtgtgtggaggaggccgcggcccttanatcaccttcttgagctcgtc

SEQ ID NO: 726 - DNA, 365 bp, Homo sapiens
ccagggactccagaatgatgccccatggcccctcggcgtcacagagaagaaaatagtctccagtggactcgatgcagtccttgtacatggtgacttatgggtgtggacctcaccagaatggttttctgatgccctgcagaaaaaggatgagacaaattgacaactctgcatctcttaggttggtgcaaaagtaattgtgctttttgctattaaaagtaatggcaagaaggctgggtgcggtggctcactcctgttatcccagcactttggaaggctgaggcgggccgatcacttgaggtcagcagttcaagaccagcttggacctgcccgggcggccgctcgagccctatagtgagtcgtattag

SEQ ID NO: 727 - DNA, 214 bp, Homo sapiens
  misc_feature 33, 39, 70, 73, 91, 97: n = A,T,C or G
ctgagctccacacagccacatgaggatggggancagccnttccttgggttttgaaataacgaataaagtngancagtgaatttcaatcaanctggtncatcaggaccgtcttgccaaaacaccagttggcttttggttgctggaagctgtagcttttcaaaacgttcacacatttcaatgtatcgtcaatgtttttacctcggccggaccacgc

SEQ ID NO: 728 - DNA, 191 bp, Homo sapiens
  misc_feature 126, 136, 140, 146, 149, 160: n = A,T,C or G
gaagtggggtggaagaagtggggtgggacgacagtgaaatctagagtaaaaccaagctggcccaaggtgtcctgcaggctgtaatgcagtttaatcagagtgccattttttttttttgttcaaatnattttaattnttgnaatgcncantttttttaatntgcaaataaaaagtttacctcggccgcaacc

SEQ ID NO: 729 - DNA, 575 bp, Homo sapiens
  misc_feature 1, 412, 460, 497, 513, 516, 519, 524, 546, 556, 564: n = A,T,C or G
nttagaaaataaaacttttaatacttaagagataacatgatgcaaacgttgcttgttggcctgactttccaggactaagaccctctgggaatcaatggggctcggtgacatggcgtaacctgctactggggtgtggtctcagacacaaaatcacactggatgttggtctacaaaggcaggattctctcattgctggataactcttgaaatgaagcctttgcctttgttacacatttggctttacaatcttcattgacaaatagttcggcaaagagtagaggagcacggccacgaagagcagcaggataagcaggaacagcaagccgatgatgacccacttaaagcggcgccacacgatgaacttcatggtcttgcatgggttggtgaaccagaagaaggaggtttctggtcnatttggtaaagtccacttggggttatgttgggtcgtccgcccttccgntggcttcgtcggctctttcgtgaggattccatgtatntcctttccacattccngcnctnttttnctacatgacttgccaccctagnaatcacctgngcgtctangtcactgacat

SEQ ID NO: 730 - DNA, 144 bp, Homo sapiens
ggattttaatatgatattttattatgggtgtctgtaaggaaaaaaaagatcaacaaccacatacaagcttacaaagttaaatttcaacacattctctatgctagtgtgacaaaagcagccccataatttggtttttattgttga

SEQ ID NO: 731 - DNA, 390 bp, Homo sapiens
aaaatactgaacaaaaagactaaaaagggccaaccaaacttgaatgtacaaatggagtaccttcttcaaaaaatacaagaaaaatgttaaacattttgttcctacaggttaaaatatctgctgcctattaggttcttctgtgacatgtgcctcccagcagtgaactaaatttgtcgacataaactggattgctaaactatgctaaatataagatgttcacatatttttattatggtaaaaaattttctaaatatgttctacatgtttcttatttatttgcctctgaaggaaggttggcctgaagaactgaaagaacctcttattttgcaagacaggcccaagcatgtaatacttttgtaccatatgagatttatatgaaataaatttttt

SEQ ID NO: 732 - DNA, 695 bp, Homo sapiens
  misc_feature 43, 272, 315, 321, 323, 431, 436, 453, 463, 473, 485, 509,532, 542, 564, 580, 585, 598, 602, 637, 639, 649, 654, 661,666, 673, 674, 689, 693: n = A,T,C or G
cggccgaggtaaaacaatttacctcagaattccaagttgaagntcccaaagtatattaaaaacttctcaaatcattaatttgaatcagatgttccaaatcaaagggaattaaatactcttttttcttgggccaattggataaatcttgaaacctattttgaaatagtattaaagtgacaagaaaaagccaaaaatatatcttttgccttggcctttggatatttttaaccatggtaccattttttggcccaaggcttgggaaatattccaanttaggaaaataaaaagcccttctttcatcattaaaagctttanggatantnaaattatttcttggaagggaaatggaaatttccccttaaattaccttttttaagtttaaatttccccggtggaaaaataaagccaaaaacaggcccctttgggaatanttggnaaaaacctggtttcttnaaaggtaatnggggaaaatnaattctttcttnaagaaatttgcccaaaccctttancccgaaggtttaacctggagttnttttgaaggncctgaagtatttttgcttgggncctggccaatcatttntttancctggccccgggngggncgctttgaaaaggggggaaatttccacaccccttngngggccggttncttanggggatnccaanctcgggnnccaaactttgggggnaaanat

SEQ ID NO: 733 - DNA, 384 bp, Homo sapiens
  misc_feature 213, 347: n = A,T,C or G
ttttttttgcttttatggtttttatttttcaatttttattttggttttcttacaaaggttgacattttccataacaggtgtaagagtgttgaaaaaaaattcaaatttttgggggagcgggggaaggagttaatgaaactgtattgcacaatgctctgatcaatccttctttttctcttttgcccacaatttaagcaagtagatgtgcagaanaaatggaaggattcagctttcagttaaaaaagaagaagaagaaatggcaaagagaaagttttttcaaatttctttcttttttaatttaaattgagttcatttatttgaaacagactgggccaatgtccacaaanaattcctggtcaacaccaccgatcctgccccggcggg

SEQ ID NO: 734 - DNA, 458 bp, Homo sapiens
  misc_feature 271, 364, 384, 405, 407: n = A,T,C or G
ctgagcctgagtgcgaagacggagagaaggccgaccacagtcatgacatcaacccccataacctggggacaactcaagaaaaccacacaggaggctgagaaactactggagcaccagggacagtctgtaaagttggatggaccaccaatgggaaaatgagagctgcccaccctggccttacactccttcaattaatacataaacagaaaggaggatatacagagagccaaaggcccatgggacgtgaccaacattccactgagtctatacnatcaaacagcaaactgtttatcatgaatacagaatgtgggcaaactcatgacttgtgcctgccccaaaaggtttgctgaagggcaattgcttnctgacgcccagctccttganggtatctattgggacatccananaatgcagtcttgcaagcctactctggaccgaacaaaactcggccgcgaaca

SEQ ID NO: 735 - DNA, 453 bp, Homo sapiens
  misc_feature 224, 296, 325, 394, 403, 443: n = A,T,C or G
aaaaaagtgacattgctttattactattggcaggtggggcctgcatgaggtggttagtgtgctcaggggatgggtgggctgtggagatgatgacagaaaggctggaaggaaagggggtgggtttgaaggccagggccaaggggtcctcaggtccgcttctgggaagggacagccttgaggaaggagtcatggcaagccatagctaggccaccaatcagattaanaaattctgagaaatctagctgaccatcactgttggtgtccagtttcttcatcatgccggtcaaggacaccangggtccttcttggttctttgtgaaggcancttagttcttgtattcatgaaacttaaggaactctttctttggaaaagaagtgtaagttataacccatncttttccanccatacctttttggaaaaacaacaaatcaaggggacttcnaatgcacccg

SEQ ID NO: 736 - DNA, 317 bp, Homo sapiens
ccagagcgagtctaccctggtaatctccaccttagacaaataattataatctagcattgcaaaaaagaaataacacatatctaccagagatatacacaacaatttcataccagcattgttagtaattagaagaattataagcaatctatgttgcaacagtaggaaaatggataaatgagctgtagtacatgtataaaagagtcaaaacagagaaaatgaatgaactagaactacatctttaacatatatgaatacttttcaaaagaaaacaatctgcttgagattatatacaatattttcctatttatacaaggttt

SEQ ID NO: 737 - DNA, 220 bp, Homo sapiens
ccagggcccccctgctccaggctgggcgtcagaaacccttccccagcccctcggacttccccagggtggaggtcccctcaaacacagcccctcagcttctaggctgctttggaggccagacaggaagagttccattcattcaccctgatcccagcagtagtagcgggatgagaaactcacccccaggccgggggtgcttggagagcgcttgagaggattt

SEQ ID NO: 738 - DNA, 262 bp, Homo sapiens
aaaaacagactgtaacttgatcttctgaaatccttctcgaaccacaactcgttctgttaaagaaatcctaggaaagaagtcctactgatattgtcgatagtctccaaaaggtgaggaaggtaactgagttgaaggcaactgggaggggtcttctgcaaactgaggaccattgggaaactgtgcagaggcaaatcttgtcaacaagataccagctccttcaattaaagctaggagaatgccacccattgcggctgacccaacc

SEQ ID NO: 739 - DNA, 567 bp, Homo sapiens
  misc_feature 536, 537, 540, 564: n = A,T,C or G
agaaggccctgaagctgatggggtcaaatgaaggtgaattcaaggctgaaggaaatagcaaattcacctacacagttctggaggatggttgcacgaaacacactggggaatggagcaaaacagtctttgaatatcgaacacgcaaggctgtgagactacctattgtagatattgcaccctatgacattggtggtcctgatcaagaatttggtgtggacgttggccctgtttgctttttataaaccaaactctatctgaaatcccaacaaaaaaaatttaactccatatgtgttcctcttgttctaatcttgtcaaccagtgcaagtgaccgacaaaattcagttatttatttcaaaatgtttggaaacagtataatttgacaaagaaaaatgatcttctctttttttgctggtcccccaaatacaattcaaatgctttttgtttattttttaccaatttcaattcaaaatgtctcaatggggctttaataaataacttcaacctctttatgacaaaaaaaaaaaaaaaaaaaattnnctnccgggggccttaggggaaaatccncac

SEQ ID NO: 740 - DNA, 357 bp, Homo sapiens
aaataattatctatgtgcctgtatttcccttttgagtgctgcacaacatgttaacatattagtgtaaaagcagatgaagcaaccacgtgttctaaagtctagggattgtgctataatccctatttagttcaaaattaaccagaattcttccatgtgaaatggaccaaactcatattattgttatgtaaatacagagttttaatgcagtatgacatcccacaggggaaaagaatgtctgtggtgggtgactgttatcaaatattttatagaatacaatgaacggtgaacagactggtaacttgtttgagttcccatgacagatttgagacttgtcaatagcaaatcatttttgtattt

SEQ ID NO: 741 - DNA, 206 bp, Homo sapiens
ccaccctttcagactcctttctgaatgcttgtggcatctgccccatgattaggaatggacaccctgaccacgtcatagatgcccatttcacactggcatgtggatagtgactataaaacgtcccttcagaacaaaccaagacctgaaggggaagcaggaagggacacccacacactgagtctctgctctcatcctagcttatctgg

SEQ ID NO: 742 - DNA, 407 bp, Homo sapiens
  misc_feature 254, 392: n = A,T,C or G
aaatagcctaaatgatggtgcttggtgagtcttggttctaaaggtaccaaacaaggaagccaaagttttcaaactgctgcatactttgacaaggaaaatctatatttgtcttccgatcaacatttatgacctaagtcaggtaatatacctggtttacttctttagcatttttatgcagacagtctgttatgcactgtggtttcagatgtgcaataatttgtacaatggtttattcccaagtatgccttaagcanaacaaatgtgtttttctatatagttccttgccttaataaatatgtaatataaatttaagcaaacgtctattttgtatatttgtaaactacaaagtaaaatgaacattttgtggagtttgtattttgcatactcaaggngagaattaaagtttt

SEQ ID NO: 743 - DNA, 62 bp, Homo sapiens
aaaaatgtctaaatttgcttttgccatggcgctaatgctaatggtaaattattgattgcgtg

SEQ ID NO: 744 - DNA, 557 bp, Homo sapiens
  misc_feature 477, 480, 484, 510, 521, 525, 530, 541, 550: n = A,T,C or G
cctacagacttatttcttcttggacacacccacggtgcggccacggcggccagtggtcttggtgtgctggcctcggacacgaaggccccagaagtgacgcagccctctatgggcccgaatcttcttcagtcgctccaggtcttcacggagcttgttgtccagaccattggctaggacctggctgtattttccatcctttacatccttctgtctgttcaagaaccagtctgggatcttgtactggcgtggattctgcataatggtgatcacacgttccacctcatcctcagtgagttctcccgccctcttggtgaggtcaatgtctgctttctcaacaccacatgagcatatcttcggcccacacccttaatggcagtgatggcaaaagctattttccgcccccatcgatttggtgttgagtactccaaaatatgctggaacttttcaggatactagagaatggctgcacacaagcgnggntgangctcacctcgccggacacctaaggcnaatcacaatgnggcntctanggaccactcgnccactgggnatatgga

SEQ ID NO: 745 - DNA, 297 bp, Homo sapiens
aaaacattgtcaggtgaggcaaatgcacaagtaatagaaagcaaagggcaaggttcactgaatcacagcagtcagaagaaagtgctttagggaaccaagagattgtttccagcctgaagaggcatgggtggcaaatcagaaaaggggattgagattaaaatagaagacttcagtctggattgttgatgacactcagtatggactatatttgtctctccttttcctttctccccatctttgggcttaatttacatgtagtgcccaggactgttcaatgcgcctgcaattaaaccaagg

SEQ ID NO: 746 - DNA, 514 bp, Homo sapiens
  misc_feature 360, 417, 438, 446, 470, 472, 501, 504: n = A,T,C or G
aaagaactctgggctgtactgaatggctggagacaacactttatcagttttgacactgacaggagtggaacagtagacccacaagaattgcagaaggccctgacaacaatgggatttaggttgagtccccaggctgtgaattcaattgcaaaacgatacagcaccaatggaaagatcaccttcgacgactacatcgcctgctgcgtcaaactgagggctcttacagacagctttcgaagacgggatactgctcagcaaggtgttgtgaatttcccatatgatgatttcattcaatgtgtcatgagtgtttaaatcaagaagaagctgcatgaatgtaatcaacattcaactggagctctnctttgcttgtcctctttgccttcggtaatatgtataaacttacatcacgactttctnttaacagaactcggccgcganccccttanggcgaattcaacaccttgcggccntntagtggatccactcggaccaacttggcgnaanatgggataat

SEQ ID NO: 747 - DNA, 249 bp, Homo sapiens
atcaatgcttacaattgtgaagagcccacagaaaagttaccttttcccatcatcgatgataggaatcgggagcttgccatcctgttgggcatgctggatccagcagagaaggatgaaaagggcatgcctgtgacagctcgtgtggtgtttgtttttggtcctgataagaagctgaagctgtctatcctctacccagctaccactggcaggaactttgatgagattctcagggtagtcatctctctccag

SEQ ID NO: 748 - DNA, 367 bp, Homo sapiens
  misc_feature 364: n = A,T,C or G
ctgagaaacagattaaacatttagagattgaaaagaatgctgaaagtagcaaggctagtagcattaccagagagctccaggggagagagctaaagcttactaaccttcaggaaaatttgagtgaagtcagtcaagtgaaagagactttggaaaaagaacttcagattttgaaagaaaagtttgctgaagcttcagaggaggcagtctctgttcagagaagtatgcaagaaactgtaaataagttacaccaaaaggaggaacagtttaacatgctgtcttctgacttggagaagctgagagaaaacttagcagatatggaggcaaaatttagagagaaagatgagagagaagagcagacctcccnggc

SEQ ID NO: 749 - DNA, 384 bp, Homo sapiens
  misc_feature 370: n = A,T,C or G
aaatttagtattacatatgatctggctaagagcaagaggccttcttatgagtgatctccatcaccctgtacagtgcctggcacagaatctagagtttagccaactctcaacaaatgttttagtgaatgaatgaatgattgactaaagaaaaacatgagttacttagtgaccaaatctaatactcagtggaatagctgattataatcgctaaaatattcataatagaaataaagagatctgtatgcagtctactccatatagtcaaaagatctcatggtagccttttctaaatgaaatttttcttaagtagtgtaagaataaatttaaactaattataattatcaagtgacttcttagggagatgttttangaaaaattattaat

SEQ ID NO: 750 - DNA, 502 bp, Homo sapiens
  misc_feature 298, 334, 376, 442, 488: n = A,T,C or G
ctgtaaaagatcctatgcgaaagacactggctcttttttttaatcccccaaataaattttgcccccttttaggccatgttccattatctcttaaaattggaacctaattcgagaggaagtaagaagggtctgttctgtggctgagctaggtgaaccccggggtaggggaaagatgttaacacctttgacgtctttggagttgacatggaacagcaggtagttgttatgtagagctagttctcaaagctgccctgcctgttttaggaggcgttccacaaacagattgaggctcttttanaattgaatttactcttcagtattttctaatgttcanctttctaagaagcatatatttttcaaagaagtgaggatgcantttctcacgttgcaacctattctgaaatgggttacctgccccggcggccctcgaaagggcgaattncacacactggcggccgtactaatggatccactcggaccaacttggntaacatggcatact

SEQ ID NO: 751 - DNA, 345 bp, Homo sapiens
taaaaattgaaaaaagtggaaaacatctttgtacatttaagtctgtattataataagcaaaaagattgtgtgtatgtatgtttaatataacatgacaggcactaggacgtctgcctttttaaggcagttccgttaagggtttttgtttttaaacttttttttgccatccatcctgtgcaatatgccgtgtagaatatttgtcttaaaattcaaggccacaaaaacaatgtttgggggaaaaaaaagaaagaatcatgccagctaatcatgtcaagttcactgcctgtcagattgttgatatataccttctgtaaataactttttttgagaaggaaataaaatcag

SEQ ID NO: 752 - DNA, 675 bp, Homo sapiens
  misc_feature 5, 13, 337, 347, 375, 384, 485, 496, 500, 502, 510, 516,530, 539, 553, 560, 563, 586, 588, 610, 622, 629, 630, 634,640, 648, 659: n = A,T,C or G
ctgtntgtactanacaaggttaccaagtgcggaattggttaatactaacagagagatttgctccattctctttggaataacaggacatgctgtatagatacaggcagtaggtttgttctgtacccatgtgtacagcctacccatgcagggactgggattcgaggacttccaggcgcatagggtaggaccaaatgatagggtaggagcatgtgttctttagggccttgtaaggctgtttccttttgcatctggaactgactatataattgtcttcaatgaagactaattcaattttgcatatagaggagccaaagagagatttcagctctgtatttgnggtatcaggnttggaaaaaaaaatctgatactccattngattattgnaaatatttgatcttgaatcacttgacagtgtttgtttgaattgtgtttgttttttcctttgatggacttaaaagaaattattcaaagggaaaaaaaacaantatgccccttntttnanccgaaccnaaccanaaaaagaaaattgngcttttttntaatccaaagggtntttttgnagnatgcttgacttttcccatttttnangacatctttccgaccttttttncctaaaaccttntattggnnaaancttaancttttcangattttcccangaatttttcctttttg

SEQ ID NO: 753 - DNA, 448 bp, Homo sapiens
  misc_feature 382, 399, 402, 405, 413, 430, 433, 441, 442: n = A,T,C or G
gaaaattccatggacaccccctggaactgctctgcagttttactccaacctacacaatgctgaaacctcttcttgggtgaatttggtattgtggtgtgtggtcttggtgctccaggtcgtgcagtggaagtctgaagccaccccataccggcctctggagaggggtgaccctgagtggagctctgagacagatgctctcgttgggtcacgcctttcccattcctgaagaataagcggagtgcttcctgcagccgaagactccatgcccaagtgcctgtaatcccccccctcaaggccctgtttatgttgggagtcttagttttcctttcgttggggggtgggggggaaacataatgacaggcccccctccacctcttcctgnagacctgcccgggcggncgntcnaaagggcnaaattccacacactggnggnccgtctannggatcc

SEQ ID NO: 754 - DNA, 603 bp, Homo sapiens
  misc_feature 337, 476, 489, 529, 539, 556, 571, 584, 594: n = A,T,C or G
ggcaggtctaaagtgtgagtaggaacattctcttattatgggtggaggaaagagagaggagattgagaaaataagataaaatacattgatgcgcatcatttttggtgttcgaaaagtaggattgaattaggactaataaatctagagaattttacctctttcaatgcccaagccacacttttctatcactttgaaaccgaaaaagtaaatactttcccaacatttgctttgctggtaggaaatgctttaataaaaatgcaatctctaagttgccatggcatcattaaaagaaaggatgtcatgcccaggtccagaacttgaaggtggcaggcaccancaagcaccatagctctgaatgggcctgccttacaggtcctcactccaacactgctcacttcttccagcttgaaaatggagaacatgttcacaccctgggttgtaagtaggaggaactctgatcagcaagaagcttgcanaggacaatatgangcaatagtattttactggacctcggccgcgaacaccttanggcgaaatcnaccccttggcggccgtntatggatccactcgnccaacttgcgaanatgggcaaanttttccggg

SEQ ID NO: 755 - DNA, 254 bp, Homo sapiens
aaaaaactggtttgtcaaatcacatacatgagcagatacacaactaccaaagtggcctgtaatagacaccagtggggcggtcaccacacagtacctgaaaaatacagctaaaaaaggaggagtctgttgagtatttaatttcagatctacttgactccttgttgaacggctttaagttagcatatagtgagtgagaggtagagtcccaagtataatagctgatgcctcagggctccatttacctgcccggcggc

SEQ ID NO: 756 - DNA, 344 bp, Homo sapiens
ctgattctatttccttctcaaaaaaagttatttacagagggtatatatcaacaatctgacaggcagtgaacttgacatgattagctggcatgattttttcttttttttcccccaaacattgtttttgtggccttgaattttaagacaaatattctacacggcatattgcacaggatggatggcaaaaaaaagtttaaaaacaaaaacccttaacggaactgccttaaaaaggcagacgtcctagtgcctgtcatgttatattaaacatacatacacacaatctttttgcttattataatacagacttaaatgtacaaagatgttttccacttttttcaattttt

SEQ ID NO: 757 - DNA, 191 bp, Homo sapiens
  misc_feature 5: n = A,T,C or G
gtaanacctcctgcccttagctctcttgctcaccacccaagaacctcaggacagaagcgagagcccattgctcctgctcagctcagcccggctgcggaggaacccttggcaggcagaacctggaggtgtcagaggctcaactcctccatctaaccagcaggctcccagagtccccggaagagcctgcgcag

SEQ ID NO: 758 - DNA, 212 bp, Homo sapiens
ctgcctttcctgagtaccctccgacggttggaagaccaggccactgcatatgtgtgtgagaatcaagcctgctcagtgcccatcactgatccctgcgaattacgaaaactactacatccatgactgccccaacccccttggggtggggcagaaggtgaagcatcccaactgactagagactcaggccctgcagggccctatagaacctgtgg

SEQ ID NO: 759 - DNA, 450 bp, Homo sapiens
  misc_feature 16, 35, 47, 51, 89, 92, 102, 125, 156, 159, 163, 189, 202,203, 224, 239, 242, 245, 321, 359, 361, 377, 410, 429: n = A,T,C or G
aaaaaagtgacattgntttattactattggcaggnggggcctgcatnaggnggttagtgtgctcaggggatgggtgggctgtggaaatnatnacaaaaaggntggaaggaaagggggtgggtttnaaggccagggccaaggggtcctcaggtccgnttntggnaagggacagccttgaggaaggagtcntggcaagccatanntaggccaccaatcaaattaanaaattctgagaaatntanctnaccatcactgttggtgtccagtttcttcatcatgcggcaaggacaccagggtccttctggttctttgtgaaggcanctagttctgtttcatgaacttaggaactctgcttggananagtgtaacctcggccnaccccctaaggcgaatccacacacttgcggccntctatggatccaactcggnccaacttgcgaatatggcata

SEQ ID NO: 760 - DNA, 519 bp, Homo sapiens
  misc_feature 246, 290, 322, 341, 409, 414, 416, 419, 427, 429, 451, 472,484, 492, 495, 497, 507: n = A,T,C or G
tttaactcctgaaatcgaactacgtttaagtttgtatgtttattacctgtttgagcacttaggtgcaattgtgggagcggggatgtcaagttcatttatgtgactctttggctcaacttacataatctttgttttgatatcacagttgtctaattattttactttgtagcttaaggcaggctgaattgttgataaaaatggaaaaaagtagtatattgttatataagcttctgaggtgtgttttgntgtataacctggaggttaaaaagcatcccttatgtatagtagtnaaggcataaactgtgactttaaatattcacanaaccagacttatttgatgngataataccatgattagcatttggttgcttttgtttatttatccggtcattttctcttccatgtcatnaacangnggnggcggtananataaacctgccggcggccctcnaaaggcgaattccacacactnggggcgtactanggatccanctngnccaacttggngaatatggcata

SEQ ID NO: 761 - DNA, 270 bp, Homo sapiens
gaggaatgctggactggaggcccctggagccagatggcaagagggtgacagcttcctttcctgtgtgtactctgtccagttcctttagaaaaaatggatgcccagaggactcccaaccctggcttggggtcaagaaacagccagcaagagttaggggccttagggcactgggctgttgttccattgaagccgactctggccctggcccttacttgcttctctagctctctaggcctctccagtttgcacctgtccccaccctccactcag

SEQ ID NO: 762 - DNA, 577 bp, Homo sapiens
  misc_feature 423, 431, 445, 465, 496, 499, 503, 516, 530, 537: n = A,T,C or G
atgacgggcccggtgctgaagggcagggaacaacttgatggtgctactttgaactgcttttcttttctcctttttgcacaaagagtctcatgtctgatatttagacatgatgagctttgtgcaaaaggggagctggctacttctcgctctgcttcatcccactattattttggcacaacagggagctgttgaaggaggatgttcccatcttggtcagtcctatgcggatagagatgtctggaagccagaaccatgccaaatatgtgtctgtgactcaggatccgttctctgcgatgacataatatgtgacgatcaagaattagactgccccaacccagaaattccatttggaaaatgttgtgcagtttgcccacagccttcaactgcttctactcgcccttctaatggtcaaaggacctcgangccccaangggaaaatccaggnccttctggtattcctggganaaaagggggaccctggtatttccaggacaancangggncccctgggttttnctgggccccctggnaatttgngaataatgccctactgggccctcaaaactatttttcccca

SEQ ID NO: 763 - DNA, 261 bp, Homo sapiens
ctggagatggtggtgaacggtctgtttgcatttcttggaagaagatcttttattctgctgctcaacccaggtctctgccttccttagagactgaggcccatccttcagtttccctgattctggagaatggcccgcagcctcccactcagggcttggctgtgctcctctagtccatcccagggctggaagggacatccctggcggtacacgaaggtgtcccagcagtgcttaaattcactgtatgtcattattgaaattttg

SEQ ID NO: 764 - DNA, 257 bp, Homo sapiens
aaaaacaaaatcacttaaaggaccctttgactgatgcctctcagtttatatttttatgtgactttatatttcttttgatacacttgacattttaggaaattttgatgtgatttatcaaaacctttacttgatggttagagttcctgcatttatgaaatcaaatctgtaataacagaaatcctggaatactcttaatatatacttctattttgtgtttgttactgtgattaatatttgcagttgtatattttacattt

SEQ ID NO: 765 - DNA, 109 bp, Homo sapiens
ccagtgctgccagccgacctttctgtggtgatggaaatctttttctgtgctgtccaatacagcagccaccgaccacttttgcttattgagcacctcaatatagaggtgg

SEQ ID NO: 766 - DNA, 155 bp, Homo sapiens
  misc_feature 5: n = A,T,C or G
tgcanattatttgcccaaagttgtcctcttcttcagattcagcatttgttctttgccagtctcattttcatcttcttccatggttccacagaagctttgtttcttgggcaagcagaaaaattaaattgtacctattttgtatatgtgagatgttt

SEQ ID NO: 767 - DNA, 345 bp, Homo sapiens
  misc_feature 9, 10, 34, 44, 51, 208, 212, 214, 231, 244, 267, 269, 278,282, 291, 303, 304, 309, 316, 319, 321, 332, 333: n = A,T,C or G
aaaaacatnnactatacattgaaatgtgtgaacnttttgaaaanctacagnttccagcagccaaaagcaactggtgttttggcaagacggtcctgatgtacaagcttgattgaaattcactgctcacttgatacgttattcagaaacccaaggaatggctgtccacatcctcatgtggctgtgtggagctcagacctgcccgggcggnccgntntaaagggcgaattccancacactggcggcncgatactagtggatccaactccncnccaactttncgtncccatgganatattttttggnnggaanttttttnccncnccggggggccnnttaaaaggggaa

SEQ ID NO: 768 - DNA, 213 bp, Homo sapiens
aaaacaactacttaacatttactcatagataaaaatatttacaattttacaccttcaggaaggctccaaaatataaacactgtacctctccctagagaaaaaaaaattattcttctcttcaaaaacaggaatacattcattttttctcactgtgtgaatcaagtaattatacaaataaacatctgaaacattttcctttttaatatatttata

SEQ ID NO: 769 - DNA, 525 bp, Homo sapiens
  misc_feature 460, 470, 479, 499, 512, 515, 519: n = A,T,C or G
aaaatgaaaaattggtgctactattaaattgcacagttgaatcatttaggcgcctaaattgattttgcctcccaacaccatttctttttaaataaagcaggatacctctatatgtcagccttgccttgttcagatgccaggagccggcagacctgtcacccgcaggtggggtgagtctcggagctgccagaggggctcaccgaaatcggggttccatcacaagctatgtttaaaaagaaaattggtgtttggcaaacggaacagaacctttgatgagagcgttcacagggacactgtctgggggtgtagtgcaagcccccggcctcttcctgggaacctctgaactcctccttcctctgggctctctgtaacatttcaccacacgtcagcatctaatcccaagacaaacattcccctgctcgaacaaacctgcccgggcgggccgctcaagggcgaattncacacacttngcggccgtnctaggggatcccaactcggnaccaagctttggnggnaaanatgggg

SEQ ID NO: 770 - DNA, 233 bp, Homo sapiens
aaaaatttacttattacttgttcttagcaaattaagacaattacaataaaacatcagctaactgggttcttgtgagaaaactgaggtcagcttggaaaggagttccccgagtggagttcccagcggcccgcggctgacggccagatctgtcctgaggggtcgtgggagcccagcgcctgccttgagggaaatgaacactgaaaacaggatttgggagcagtattggattgaca

SEQ ID NO: 771 - DNA, 271 bp, Homo sapiens
tggcagtgcaaatatccaagaagaggaagtttgtcgctgatggcatcttcaaagctgaactgaatgagtttcttactcgggagctggctgaagatggctactctggagttgaggtgcgagttacaccaaccaggacagaaatcattatcttagccaccagaacacagaatgttcttggtgagaagggccggcggattcgggaactgactgctgtagttcagaagaggtttggctttccagagggcagtgtagctttatgctgaaaaggtgg

SEQ ID NO: 772 - DNA, 533 bp, Homo sapiens
  misc_feature 351, 374, 412, 461, 484, 487, 504, 524, 528: n = A,T,C or G
ccatggaagcctcagggcacagggcaggctggtggatgttttggtcccaagcccctttctgatcacaggcaggtcaattaagcctctgggcctggctgtcctctcctggacgtggagtgtaagtcccacactacacaaggctgtgcagcttcacagagatagtgcttgtgatgcttatccctaacaagaggaccttgaacttggagaattataggaagactaggtctgtgcccttaaattgatcattctttccatcctgactaagcacgggtgagccagtttgtgcagaggtctgtgtgtagatgggaccatggaggaaaagagaagcttccctttgcatggtctccttanaacccattttgtaccggacccanaaggatgtatggacccaaagcacatccctcttggaaanggctggccccagtcttcctaatgcaacctgcccggcgggcgcttcaaanggcgaatttcacacacttgcggncgntactaatgggatcccanctcggtaccaaacttggcgnaaanatggg

SEQ ID NO: 773 - DNA, 341 bp, Homo sapiens
ttctgaagttgccatcagttttactaatcttctgtgaaatgcatagatatgcgcatgttcaactttttattgtggtcttataattaaatgtaaaattgaaaattcatttgctgtttcaaagtgtgatatctttcacaatagcctttttatagtcagtaattcagaataatcaagttcatatggataaatgcatttttatttcctatttctttagggagtgctacaaatgtttgtcacttaaatttcaagtttctgttttaatagttaactgactatagattgttttctatgccatgtatgtgccacttctgagagtagtaaatgactctttgctacatttt

SEQ ID NO: 774 - DNA, 193 bp, Homo sapiens
  misc_feature 151, 167, 168, 171, 178, 185: n = A,T,C or G
aaaaatgttttgtagggaaaccctttaatgctttcatttttattcaaaatcagtccagctgctagtcagcgggcagcagctacaataccaagttctggcagttgcagtactagatattgtgcctgcaagtcataaaaaaaaaaaaaaaaanaaaaaaattgaaaaanngcntttcccnttaaaanaaaaaaat

SEQ ID NO: 775 - DNA, 210 bp, Homo sapiens
ctctagtgctgtgaaaaaaaaatgctgaacattgcatataacttatattgtaagaaatactgtacaatgactttattgcatctgggtagctgtaaggcatgaaggatgccaagaagtttaaggaatatgggagaaatagtgtggaaattaagaagaaactaggtctgatattcaaatggacaaactgccagttttgtttcctttcactgg

SEQ ID NO: 776 - DNA, 161 bp, Homo sapiens
ctgctcctgctgctgctgcagccccagctaaggttgaagccaaggaagagtcggaggagtcggacgaggatatgggatttggtctctttgactaatcaccaaaaagcaaccaacttagccagttttatttgcaaaacaaggaaataaaggcttacttcttt

SEQ ID NO: 777 - DNA, 459 bp, Homo sapiens
  misc_feature 362, 376, 414, 432, 435, 445, 447, 451: n = A,T,C or G
tggagtctgaagtagctataaagcagctataaaacagaaatacatgcatagctgcagaaaccatgacaggtagaggacttttcttttggttttgttttgttttgttttgttttgtttttggttttacagagaagagatttttattacaaagaaaaaaattccagtgaattgtgcagaaatgctggtttttacaccatcctaaagaaaaactttacaagggtgttttggagtagaaaaaaggttataaagttggaatcttaaattgtaaaattaaccattgagtgtcaaagttctaaaagcagaactcattttgtgcaatgaacataaggaaagactactgtataggttttttttttttctcnttttcctcggccgnaaccaccctaagggcgaattccacacacttggcgcccntactagtggatccaactnggnccaacttggngnaatnatggcata

SEQ ID NO: 778 - DNA, 288 bp, Homo sapiens
cagagagccattttgtgaatggattggattatttaataacattaccttactgtggaggaaggattgtaaaaaaaaatgcctttgagacagtttcttagctttttaattgttgtttctttctagtggtctttgtaagagtgtagaagcattccttctttgataatgttaaatttgtaagtttcaggtgacatgtgaaaccttttttaagatttttctcaaagttttgaaaagctattagccaggatcatggtgtaataaaacataacgtttttcctttacctgcccggg

SEQ ID NO: 779 - DNA, 508 bp, Homo sapiens
  misc_feature 406, 436, 447, 478, 488, 496: n = A,T,C or G
aaatatctaaaacaatggcccactgaagaaaggaacaattaactctttaattaattccttaggataaatacccagaaatttaacagctagggcagacttctaatacaataccgaaagtccttccaaaaaccaagtggttgccaacttatgtcccttagcattataacattcttgagccaatagtgtaaaaatacgctgacaattttataggcaaacattactcaaggtatcttactttccacttattactaaagtaattaacccctaaatagatgctcctcaacagtgggactacatcctggtaaacctatcataagttgaaactatcaagttgaaatgcatttagtaccctgataaacctatcataaagttgaaaatttgtaaattgaaccagtgtaaatcagangccatcttacacctcggccgcgaccacctnagggcgaattncagcaccttggcggccgtactagtggatccnactcgtaccnacttgggnaatcatggcata

SEQ ID NO: 780 - DNA, 569 bp, Homo sapiens
  misc_feature 369, 411, 472, 473, 513, 515, 522, 537, 539, 545, 548, 550,555, 558, 565: n = A,T,C or G
aaagcactcacataaatccatttcacccaaaaaggaaacataaagtgcttctagcagtacaagcacggttggcatggcctttccaaaggtcttccactagagtctagagaaatctaaatatagtcatccacaaactggatgtttttattttctgagccattagagattttcaaaatcactttgatttttaaaaactcatcaaatgtgaatcatggcggggaagaccactgagctgatttctgataactaagttatcactgaacataatttatcatatatggctactggcatcatgaagaccttgggatagggaagactcttcatgagaaatataaacatcacttgtgtaggaatcaccaggtgtcctanagcagtttgactaaagacttctagtgtttactcctcccacgnactcaacccaagaccagagacaatggcaactcctgaggttacacagaaccagtgagtatgnnagctcacttagccattaatctaaatgtataactggtgctntntgcttanctatatctaaggttntntctgtnttntnaactncgngcgcagnatcc

SEQ ID NO: 781 - DNA, 391 bp, Homo sapiens
gggctgaagaaatcactattgtgtatatactcaagtctttttatttttcctcttttcataaatgctcttggacattattgggcttgcagagttcccttattctggggattacaatgcttttatcgtttcaggcttcattttagcttcaaaacaagctgggcacactgttaaatcatgattttgcagaacctttggttttggacagtttcatttttttggatttgggatagattacataggagtatggagtatgctgtaaataaaaatacaagctagtgctttgtcttagtagttttaagaaattaaagcaaacaaatttaagttttcttgtattgaaaataacctatgattgtatgttttgcattcctagaagtaggttaactgtgttttt

SEQ ID NO: 782 - DNA, 195 bp, Homo sapiens
  misc_feature 9, 12, 19, 35, 36, 40, 47, 146, 176, 179, 184, 186, 189: n = A,T,C or G
gggaattgnctnaatcttntacggcgcctgtatgnnttgngaattcncctttcgtggcgcggccaggctaaccactcaatccatttgtgcttttgttttttttatggtgcttaaagtaaaaaacccatccttttgcaaggcattcnttgttggtaccttaggcattttaattttgnctnaaaantntgnaaaaaa

SEQ ID NO: 783 - DNA, 336 bp, Homo sapiens
  misc_feature 174, 274, 282, 283, 295, 296, 305, 311, 312, 329, 333: n = A,T,C or G
ccacagggtccactgaaacggggaggggatggcagcttgtaatgtgggcttttgccacaacccccttctgacagggaaggccttagattgaggccccacctcccatggtgatggggagctcagaatggggtccagggagaatttggttagggggaggtgctagggaggcctgancagagggcaccctccgagtggggtcccgagggctgcaaagtcttcagtacttgtccctcacagcaaacctgcccggcggccgcccaagggcgaattccanacacttgnnggccgttactannggatccaanctcggnnccaacttggcgtaatcntggnata

SEQ ID NO: 784 - DNA, 166 bp, Homo sapiens
attgatgaccacagagctgggaaaattgttgtgaacctcacaggcaggctaaacaagtgtggggtgatcagccccagatttgacgtgcaactcaaagacctggaaaaatggcagaataatctgcttccatcccgccagtttggtttcattgtactgacaacctcag

SEQ ID NO: 785 - DNA, 196 bp, Homo sapiens
tttggcatgattcttagtcatacttgaacttgtctcattccacctcttctcagagcaactcttcctttgggaaaagagttcttcagatcatagaccaaaaaagtcataccttcgaggtggtagcagtagattccaggaggagaagggtacttgctaggtatcctgggtcagtggcggtgcaaactggtttcctcag

SEQ ID NO: 786 - DNA, 148 bp, Homo sapiens
  misc_feature 49, 74, 75, 107, 108, 117, 128, 140: n = A,T,C or G
gccttaacctggcctggatgcctaccaggccccaccaacacctaactgntggatattataatggcatggtggtnntctggaaccttcccactaactcacccctgcannggatacggntctctgatggntccttaaagctntacccctt

SEQ ID NO: 787 - DNA, 179 bp, Homo sapiens
aaacagacctgtagtgactgaggtgtggtttaggacttcaaggttggatggcccaggcgggaaacagagtggagagctcagtaggccgtctgagactgctgctggcggtagccaccgcggcgcatgtagccctcgtttttgcggtagccgtccttctggtctcgacctgcccgggggcc

SEQ ID NO: 788 - DNA, 570 bp, Homo sapiens
  misc_feature 330, 352, 389, 450, 454, 461, 474, 482, 487, 491, 524, 537,557, 567: n = A,T,C or G
ccagcttctggctgtgttttcacatgccatatgacatcatttaaccttaattactttcttactccaaattcaatcacactaggagttagggtttcaacatacgaattcgtgggggacacaattcagtccacagcatcctgtaatgttctatgacgtaagcaagaagtcagatgtgtttgccttctactcctgcattctctgagaaggaatcccagtcccagactcttgaactctaatttcactgaatagaagcaattaactaggctctgaggcagaggaagaaagaggacctgggatgaagactgaaaggtcactgatggctggggaganggaagaaagtctgaaaggagangctcaggcaaggcagatcaattcggataggcacttanagaaaaatcttgcccctgcccaagaactgatgcatctaacctaaaacctcttttccagtanaagntgtctgnccatctttcaccnctaatggnaaacnaggnagatgccttttcctgcccggcggcgtcaaaggngaatccacccccncgcgtctagggatcactcgncactgggganatg

SEQ ID NO: 789 - DNA, 154 bp, Homo sapiens
cgggtggctcaggagcttgacaagcccactgtggagtggggagcaggagaggaaggggtactggttagtctcctaggggctgagtggagtattgttgccctgcctatatcccctaaaggtggagggtagagcggagggttagcagtcaccttcc

SEQ ID NO: 790 - DNA, 129 bp, Homo sapiens
ctgccaaggagaccctgttatgctgtggggactggctggggcatggcaggcggctctggcttcccacccttctgttctgagatgggggtggtgggcagtatctcatctttgggttccacaatgctcacg

SEQ ID NO: 791 - DNA, 177 bp, Homo sapiens
ctgcttaagctggcccacaagtacagaccagagacaaagcaagagaagaagcagagactgttggcccgggccgagaagaaggctgctggcaaaggggacgtcccaacgaagagaccacctgtccttcgagcaggagttaacaccgtcaccaccttggtggagaacaagaaagctcag

SEQ ID NO: 792 - DNA, 366 bp, Homo sapiens
ccagtttggtgtcggtttctattccgccttccttgtagcagataaggttattgtcacttcaaaacacaacaacgatacccagcacatctgggagtctgactccaatgaattttctgtaattgctgacccaagaggaaacactctaggacggggaacgacaattacccttgtcttaaaagaagaagcatctgattacctcgaattggatacaattaaaaatctcgtcaaaaaatattcacagttcataaactttcctatttatgtatggagcagcaagactgaaactgttgaggagcccatggaggaagaagaagcagccaaagaagagaaagaagaatctgatgatgaagctgcagtagagaaaaa

SEQ ID NO: 793 - DNA, 289 bp, Homo sapiens
ctgttgcagcatccagttcatcttaagaatgtcaacgattagtcatgcaataaatgttctggttttaaagaaattacataaaaggccttagtagtcttagaaatgttttggaggcttttagtgaaatgtcatttcaggcctagtggtccgaatctgccctcctgcggtccatgcgatgccctgctgaggtctgtgaacacagctcatgagaaaccacggaaatggcccgaatgtgcttacgtgtgaaaatactgatactgtgattcaacagagctgtttttcaagccag

SEQ ID NO: 794 - DNA, 311 bp, Homo sapiens
caaggccatttttgctggctataagcggggtctccggaaccaaagggagcacacagctcttcttaaaattgaaggtgtttacgcccgagatgaaacagaattctatttgggcaagagatgcgcttatgtatataaagcaaagaacaacacagtcactcctggcggcaaaccaaacaaaaccagagtcatctggggaaaagtaactcgggcccatggaaacagtggcatggttcgtgccaaattccgaagcaatcttcctgctaaggccattggacacagaatccgagtgatgctgtacccctcaaggattt

SEQ ID NO: 795 - DNA, 551 bp, Homo sapiens
  misc_feature 358, 368, 396, 408, 409, 443, 461, 468, 481, 521, 540, 541,542: n = A,T,C or G
ctgaaaaatgacaggctagggacatagaatattgtgaactttatactgttagaatcactgtccattaaatgatcactagctaatggtcactaaatttacaaattaaggaaattatatatagaatactgcaaaaacacagtaaaaagactgaagttcgcccatttctgctcaggaagtctcttcactcctaagcttcatatgttgtccttctggcttcaaaatttctgctattattactgtttttcctccttttgatcttccttttgttccccagtgccagaacttccagagccttctcgctcagatgccatctttttgtatgccatttcgagcagcttcagtgatgcctgctgaaaanaagatgctgnctgtctaatattttctccggttcgctgncttttctagccnngaagctccctcattttggaaatctcttcttttanctggtgcactcatcacangggaatnggccctggaatcntccatcttgggtctggggcgaacctgcccggcggccgtcnaaggggaattccccccctnnngccgtccta

SEQ ID NO: 796 - DNA, 204 bp, Homo sapiens
  misc_feature 176, 183, 184, 199: n = A,T,C or G
ctgtggaggagggtttcagaggagagaggtcggagagcagaggcctgagaagccagaggcaggtggagagagggtggaaagtgagcagcgggctgggctggagccgcacacgctctcctcccatgttaaatagcacctttagaaaaattcacaagtccccatccacaaaaaaaaanaaaaacnnaaacttttcggggantaaaa

SEQ ID NO: 797 - DNA, 142 bp, Homo sapiens
aggtaaagtgaatgtgatgttggagagagtgggaaggaaaagtaatggcaagtatgcttgctcattaccaggcactgtgctaagctctgtgaatacacagataagtaaaatccacgctgtttctcaaagaactcacaatctg

SEQ ID NO: 798 - DNA, 455 bp, Homo sapiens
  misc_feature 392, 430, 436, 439, 443: n = A,T,C or G
ctggcaggacctgaaggatcacatgcgagaagctggggatgtctgttatgctgatgtgcagaaggatggagtggggatggtcgagtatctcagaaaagaagacatggaatatgccctgcataaactggatgacaccaaattccgctctcatgagggtgaaacttcctacatccgagtttatcctgagagaagcaccagctatggctactcacggtctcggtctgggtcaaggggccgtgactctccataccaaagcaggggttccccacactacttctctcctttcaggccctactgagacaggtgatgggaattttttctttattttttaggttaactgagctgctttgtgctcagaatctacattccagattgaggatttaatgtcttangaaatttttttaattttttttttttaccctgccccggncggccntcnaaanggggaaattccc

SEQ ID NO: 799 - DNA, 433 bp, Homo sapiens
  misc_feature 400, 414, 424: n = A,T,C or G
ctgaagcaagggtgctggggccccatggccttcagccctggctgagcaactgggctgtagggcagggccacttcctgaggtcaggtcttggtaggtgcctgcatctgtctgccttctggctgacaatcctggaaatctgttctccagaatccaggccaaaaagttcacagtcaaatggggaggggtattcttcatgcaggagaccccaggccctggaggctgcaacatacctcaatcctgtcccaggccggatcctcctgaagcccttttcgcagcactgctatcctccaaagccattgtaaatgtgtgtacagtgtgtataaaccttcttcttctttttttttttttacctcccggcccccctcaaaaggggaattccacacactgggggcggtactanggatccaactcggnccaacttggngaaaaatgg

SEQ ID NO: 800 - DNA, 506 bp, Homo sapiens
  misc_feature 426, 438, 447, 457, 469, 496: n = A,T,C or G
ctggctttgcagtcatgcataaaggtgaggacacttaattcaaggcatctgggggctggtgtcaccgcacatgaagagtagtgcccatgctgtcccacgagcttccttgggaaaagggaaaaacaaatcttttcctcaaatagaattgtcgcaggaaagagccatgacattttattcactgtttaatcatcgggtggcaggatttctttgaagtagaatctggtagtacccctcccaatctttgctggatcacttctaaatggtgaatatactctgtcaaggaatgttctggatcttgagaagcagtcagggatctttctaatcttgaatttggggatggagtggctcttcccccctgtgtggggaggctgcttgctgccatctgccggcctctggcagggtccctggtgtggacctgccccggcnggccctcgaaanggcgaaatncacacacttngcggccgtctantggatccaactcggacccacctggcgnaactggcata

SEQ ID NO: 801 - DNA, 181 bp, Homo sapiens
cggcaagtccctgtactattatatccagcaagacactaagggcgactaccagaaagcgctgctgtacctgtgtggtggagatgactgaagcccgacacggcctgagcgtccagaaatggtgctcaccatgcttccagctaacaggtctagaaaaccagcttgcgaataacagtccccgtgg

SEQ ID NO: 802 - DNA, 109 bp, Homo sapiens
ctgcaggctattacctgaaaaagacaaggcagttatattaggttctcgtgtaaatatgaatatacaatcaagtcaagctcctgacaaattatacatcaaggatgtatat

SEQ ID NO: 803 - DNA, 384 bp, Homo sapiens
  misc_feature 362: n = A,T,C or G
ccaggctggtgtcgaactcctgggctcaagccattgcccacctcaaagtgctgggattacaagtgtgagccaccacacccaaccaggttatttgaacatttttaagtactgtattttctctattgtaatattgactgtcatctctgtgcaggttttttagtggttgctctaggttgaaaccctttgaattcttaggtatctaagagtgagcattttctttttttgactgctatactctcaccagttgccagcttctcatataaatattgtaaatgctctcgtttaggtaactcagcttctggagttgagggaacttcaaaatcagaagagctctgggaatctgcatttgtgctaagatttancaaactttacctgccgggcggg

SEQ ID NO: 804 - DNA, 267 bp, Homo sapiens
agagctgaccgctgaggacctgacgcagatgggaatcacactgcccgggcaccagaagcgcattctttgcagtattcagggattcaaggactgatccctcctctcaccccatgcccaatcagggtgcaaggagcaaggacggggccaaggtcgctcatggtcactccctgcgccccttcccacaacctgccagactaggctatcggtgctgcttctgcccactttcaggagaaccctgctctgcaccccagaaaacctctttgtttt

SEQ ID NO: 805 - DNA, 251 bp, Homo sapiens
aaaatccccatgcctgtggctgcgcttcctatttctagggctgggaagcactccttgcatcaaggggtcacttacagaacaaagaatcttttgggggaaacttcctctaaaaccctctcatatatagacagctttgactggagggtccatttttcttccaggatggtgttactgcagttgaaagggcaatatgaagttactttcttaatgtgacctagcaataggcatagctacgtggcactatattctgg

SEQ ID NO: 806 - DNA, 282 bp, Homo sapiens
gcctttttatccaaccctaagattacttcacaaatatccttttatcctgccacaccagcaggttgataaaggagccatcaaatttgtactcagtggagcaaatatcatgtgtccaggcttaacttctcctggagctaagctttaccctgctgcagtagataccattgttgctatcatggcagaaggaaaacagcatgctctatgtgttggagtcatgaagatgtctgcagaagacattgagaaagtcaacaaaggaattggcattgaaaatatccattattt

SEQ ID NO: 807 - DNA, 487 bp, Homo sapiens
  misc_feature 409, 430, 441, 453, 457, 479: n = A,T,C or G
ccactcactctcggacgtagaccctggtgcacacaacgtcatccgccgtcatggtcaggatcagttccccatcgttggtcagttctctggtccacgaggtcttggggccctctcccttcaggagcttctgctcacagaccattttattctcactctcccatttcaccaggctcttacagggcctcccatccacagtctgctcctcaaactcctccccaaccttgaagttaatctctgtggtgcgcacggtggtggaggttttgatgtagaaagtgtctccctcctgtttgatctccactgctggcttggacgctgcagccacagcaatcttcctcagcatcacattcacccccagcactttgagcaattctcgaagttttccgatcggatgattttccagttgccaganaaattgggcatggtggcggcncgggaagcggnccccgtagactnctangctggagcacttggacactgtnttttaatt

SEQ ID NO: 808 - DNA, 269 bp, Homo sapiens
  misc_feature 32: n = A,T,C or G
catctacaaccctgaagtgcttgatatcacanaggaaactctgcattctcgcttcctggagggtgtccgcaatgttgccagtgtctgtctgcagattggctacccaactgttgcatcagtaccccattctatcatcaacgggtacaaacgagtcctggccttgtctgtggagacggattacaccttcccacttgctgaaaaggtcaaggccttcttggctgatccatctgcctttgtggctgctgcccctgtggctgctgccaccacag

SEQ ID NO: 809 - DNA, 219 bp, Homo sapiens
aaaaatctaatctgccagtttagcgttttccaccaactcggggagctgaaactttcacaggcttcacaatcttttgcttaggtgctgcctttgtaggtgccttagcagcagccattgcagtctttttagatgcttgcttagtcttttttgcttccttagcagccctgatagcttgttctcgttgagcctttctaacttcaggtttctgattcctcttgg

SEQ ID NO: 810 - DNA, 360 bp, Homo sapiens
  misc_feature 315, 317, 336, 355: n = A,T,C or G
ctgacacagtcagaactcagcagctaccatagaaaagagaagcagctctacctgggcatgtttggttaacaaagaagaaagatgctcctccagttgaacttaggtggaccattaaacatgcatgaaggagaaatctgagcctcagcaagagaaattaaccctatacctctgacccaggtggatttttgtttctagttctgcacaaacttcactacttagacagtctgagtctttttctgtctatccatctgtttatttctatacctttcaatacatgttattgttgcagatatttggcttgagaaatataatcananaacataaaaaaaaaaaaancctgcccggggcgccccgntcgaa

SEQ ID NO: 811 - DNA, 225 bp, Homo sapiens
  misc_feature 39, 132, 178, 179, 190, 199, 218: n = A,T,C or G
ctgaaacagcatcaagttttcaaagaattaagagcctcngggaggggacccgctttcaagatactgaaggtgacatcaagagtctcctcctaacaggaccaactctatctaaaagttgcttacgagtaactngaatcttgtgtaatagcctacatctcacagaccatcagggatgagnnagaacactgtngttgatggnccgggatgaagagagggtnaacaaaa

SEQ ID NO: 812 - DNA, 340 bp, Homo sapiens
ggaaaatgtcaacctttgtaagaaaaccaaaataaaaattgaaaaataaaaaccataaacatttgcaccacttgtggcttttgaatatcttccacagagggaagtttaaaacccaaacttccaaaggtttaaactacctcaaaacactttcccatgagtgtgatccacattgttaggtgctgacctagacagagatgaactgaggtccttgttttgtttcgttcataatacaaaggtgctaattaatagtatttcagatacttgaagaatgttgatggtgctagaagaatttgagaagaaatactcctgtattgagttgtatcgtgtgggtgtatttttt

SEQ ID NO: 813 - DNA, 249 bp, Homo sapiens
attttgtaactgtaaagatgaatgtcagttgttatttattgaaatgatttcacagtgtgtggtcaacatttctcatgttgaagctttaagaactaaaatgttctaaatatcccttggacattttatgtctttcttgtaaggcatactgccttgtttaatgttaattatgcagtgtttccctctgtgttagagcagagaggtttcgatatttattgatgttttcacaaagaacaggaaaataaaatattt

SEQ ID NO: 814 - DNA, 615 bp, Homo sapiens
  misc_feature 519, 528, 531, 564, 587, 590, 607: n = A,T,C or G
ccagaagcaggtattcaaagcagagaacaatccctgggtgacccccattgcagaccagttccagcttggcgtgtcccatgtttttgagtatatccgttctgagacatacaaatacctctacggcagacacatgcaggccaacccagaaccaccgaagaagaataatgacaaatcgaaaaagatcagccggaaacccctggcagccaagaacagataaggaagggattggcatcggctggccttccagcaccttctctctccaacacttcattctctcttgccctgtctctcaaataaacccaatgctgcgtgtgaggccttttttatttttcttttcactctctttctaatgctttccaccttaccttttagattcttttgctaggtgggagattgttataaggtctttaaaccatttccatttgttctttaacattaccaaaagcaggggaacaaaagctcttattcaactgcgaaattccataatgggctctggctttcttgaataaaaatcacaanggtgctttnttnttaaaagaataattaaaatctgtaacccttttncctgcccgggggccccctttaanggngaaattcagcacccttnggggcgtt

SEQ ID NO: 815 - DNA, 309 bp, Homo sapiens
ccactacgataagcaggtagctgggttttgtagtgagcttgctccttaagttacaggaactctccttataatagacacttcattttcctagtccatccctcatgaaaaatgactgaccactgctgggcagcaggagggatgatgaccaactaattcccaaaccccagtctcattggtaccagccttggggaaccacctacacttgagccacaattggttttgaagtgcatttacaaggtttgtctattttcagttctttactttttacatgctgacacatacatacactgcctaaatagatctctttca

SEQ ID NO: 816 - DNA, 284 bp, Homo sapiens
  misc_feature 257: n = A,T,C or G
ccctcctcggcttccttcctctctgcaatgaccttcaacaaccggccaccagatgtcagccctactcacctgagcgctcagcttcaagaaattactggaaggcttccactagggtccaccaggagttctcccaccacctcaccagtttccaggtggtaagcaccaggacgccctcgaggttgctctgggatccccccacagcccctggtcagtctgcccttgtcactggtctgaggtcattaaaattacattgaggntccgaaaaaaaaaacctgcccggcggc

SEQ ID NO: 817 - DNA, 512 bp, Homo sapiens
  misc_feature 391, 401, 407, 412, 423, 457, 462, 477, 482, 492, 497, 498,507: n = A,T,C or G
ccaatcaataagggactttcctctctgccattaagagcaacgatgctgaccacatactctgtgcctggagtgaggttggtgagggtgatggaattccgagagtggggcacccgatcttctcgaggtctcccactgaagtgctcgggatgatggcggatcctgtagccagtgatggtggctcgaggagcaatccagtgcacagtaaaagagttggcagtaatatcagaaaagtcaatgccagttggggaatcaagacctgtttttcccacccgggggaggaagagaaaaaaaaaagaaaagacccccccagtttaggaagtgaggaaggtgtaggggaaattaacgtacatccaacatttcgttccttgtctcatcaatccatgatttgccntaaaccaaanagtaanaagtnctgattctaanctacatatgaattttaccttcggccgcgaccccncttangggcgaattccaccnccctngcggccggtncttannggatcccanctcgg

SEQ ID NO: 818 - DNA, 214 bp, Homo sapiens
ctgagattcaagtgcctgacctggaagccgatctccaggagctatgtcagacaaagactggggatggatgtgaaggtggtactgatgtcaaggggaagattctaccaaaagcagagcactttaaaatgccagaagcaggtgaagggaaatcacaggtttaaaggaagataagctgaaacaacacaaactgtttttatattagatattttacttt

SEQ ID NO: 819 - DNA, 518 bp, Homo sapiens
  misc_feature 130, 326, 344, 382, 396, 432, 450, 457, 464, 465, 491, 499,503, 509, 515: n = A,T,C or G
aaaacccaaacttccaaaggtttaaactacctcaaaacactttcccatgagtgtgatccacattgttaggtgctgacctagacagagatgaactgaggtccttgttttgttttgttcataatacaaaggngctaattaatagtatttcagatacttgaagaatgttgatggtgctagaagaatttgagaagaaatactcctgtattgagttgtatcgtgtggtgtattttttaaaaaatttgatttagcattcatattttccatcttattcccaattaaaagtatgcagattatttgcccaaagttgtcctcttcttcagattcancatttgttctttgccagnctcattttcatcttcttcatgggtcacagaaactttgnttcttgggcaagcngaaaaataaattgtcctatttttattttgagaaggntacctcgggccgcgcccnctaaggngaattcnnccactgggggcgttctaggggatccnactccggnccancttggnggaatntgg

SEQ ID NO: 820 - DNA, 375 bp, Homo sapiens
ctccaggcgccctcggccgcccatcatggttaattctgtccaacaaacacacacgggtagattgctggcctgttgtaggtggtagggacacagatgaccgacctggtcactcctcctgccaacattcagtctggtatgtgaggcgtgcgtgaagcaagaactcctggagctacagggacagggagccatcattcctgcctgggaatcctggaagacttcctgcaggagtcagcgttcaatcttgaccttgaagatgggaaggatgttctttttacgtaccaattcttttgtcttttgatattaaaaagaagtacatgttcattgtagagaatttggaaactgtagaagagaatcaagaagaaaaataaaaatcag

SEQ ID NO: 821 - DNA, 143 bp, Homo sapiens
gcccaaagttgtcctcttcttcagattcagcatttgttctttgccagtctcattttcatcttcttccatggttccacagaagctttgtttcttgggcaagcagaaaaattaaattgtacctattttgtatatgtgagatgttt

SEQ ID NO: 822 - DNA, 182 bp, Homo sapiens
aaaaaaggaccgttgagaaaggggtggagtataaggaaaccgcaagtgagagggagtactctagtggggtgggggtgccgatacacagctaggcttaaggggccagggaaggaagtggtgccagaatcctagagatagtcatgattacgcaagagttgcccggcaggagagtccatagcaac

SEQ ID NO: 823 - DNA, 300 bp, Homo sapiens
  misc_feature 175, 280, 288: n = A,T,C or G
ccaccccggagatgacacgaggctcacatgactctagacacttggtggaaagtgaggcgagaaaaacaatgacttgggccaattacacgactgcaaagctagagctgccaacagggctccagggagcttggcttctgtagaagttctaaggaagcggtacgaactccacggcggnggggcgctaactagcagggacccctgcaagtgttggtcgggggcctcgagctgcctgagctgacacgaggggaggggtctgtgtagcacctgccgggcggcgctngaaagggncaattcaccact

SEQ ID NO: 824 - DNA, 627 bp, Homo sapiens
  misc_feature 370, 422, 511, 530, 541, 551, 554, 557, 565, 566, 576, 581,588, 603, 604, 610: n = A,T,C or G
aaaccaactttgtgatttttattgatgggcgacaactttatactcctagatatcactaaactgtgtacaattagggacgcagcattagagaagagcagacagcagaattaaacagagcagactgaaggagagatcttcattatttgcccatttttcattatgtgtacacagaagcatgaatgcaatttgaaatcttttaatggcaataaagttacaatcacccatctatgtagactaacattttaactccaaatatttgatctgcaatgtgtacgtaagcagtttctctcagtacaattattaaaatttttcctgttaggaaccagcaacttattttttatgtttatttttcttttgaagtaagaactangttcttctttgataactggctcatttttatcatttatcaaaaactaaagggnagggaagaaaaagtgtgatggattaaaaaatttcttttttaaggaaagataaaattcattttcacaaatttaccaatggttgtgctggngcagggattatttttctanctggcccgggnggggcgctcnaanggngaaattcnncccctttggnggcgnttctagngggatccagcttggnncccaanttgggggaataaagggg

SEQ ID NO: 825 - DNA, 501 bp, Homo sapiens
  misc_feature 356, 411, 452, 459, 469, 481, 490: n = A,T,C or G
aaatggtatctcttagtaacttgcactcgttaaagaaacacggagctgggccatcgtcagaactaagtcagggaaggagatggatgagaaggccagaatcattcctagtacatttgctaacactttattgagaaattgaccatgaattaatggactcatcttaatttcttctaagtccatatatagatagatatctatctgtacagatttctatttatccatagataggtatctatacatacacatctcaagtgcatctattcccactctcattaatccatcatgttcctaaatttttgtaatcttactgtaaaaaaaagtgcactgaacttcaaaacaaaacaaaaaacaacacnacaaaaacaagtccaactgatatatcctatatctgttaaaattcaaaagtgaacnaagctttaactggcctcggccgcaccccctaaggcaattcnacccctngggcgtctantgatccactcgnaccactggngatatgctact

SEQ ID NO: 826 - DNA, 679 bp, Homo sapiens
  misc_feature 493, 514, 526, 573, 579, 590, 600, 610, 612, 626, 631, 641,643, 648, 657, 661, 667, 669: n = A,T,C or G
aaaattttagaagttaagacttacgaccacctcagtatatgccattcctaatagaaggaggtatgacggtttcaaactcgtgcagagctgcattttcatttacaagtctctgtaggcactttagaagtgaagcttggcttcaaaatacaaacactgggggctttggctcaaccttttaatataaaaaaattcactgatgtacaaaaatttgaaagtgtgacaatgacaattatgaaatcctgtgactgaaagtcccctcgagtgcactctgtggtgcacatgcgcccgcccacacaaactctggcatggaaacataaactaatgcaaaccagtgctacccagaagcaccaacacgtgtgttctccattccaccaatcacagaccagtatctactccaaacatccagtaacgaaaactatggcatcttcccaggaacagcaaggcaggcttcttactcacgatgaaccagcacgaataaaccccccaaaaaganaactgctacttaaattagganagtcattctgangatcggcccaattcccatttaggaacaaatttttctgaatttcaaantcgggnactttagaaanttttttcttntttctaaaananacctcggcgggacnccttnggggaatccncncctgnggcgtctanggtncaattngnccccctgggg

SEQ ID NO: 827 - DNA, 453 bp, Homo sapiens
  misc_feature 16, 381, 407, 423, 434: n = A,T,C or G
ctgattaatcattgtngatgactgcagtttttcccatccttcccgatttacatctgttcaggccaattcaaatatggtgagtaaatgaattagacatgcaaattcaagccccaggctagaaagagggagagagaggaaaagagagagaaagagagagagcgcgcgcatggctgaaatcctaggcgagaagaaagattcttctgcctgatagttattttaatgctctaaaaatcctgcaaatcagaccttcctgtcccttgcaggataactgtaaggctttttaatgtaaggaggcttctggaggaagtgaagagctatggaaacaacacacatagtgtggaaaaatttcacattttttttacctcggccgcgaccacgctnagggcgaattccagccacttggcggncgttctagtggatccnactcggaccancttggcgtaatcatggcta

SEQ ID NO: 828 - DNA, 562 bp, Homo sapiens
  misc_feature 364, 408, 409, 439, 444, 472, 495, 512, 514, 530, 551: n = A,T,C or G
ccaggatctttggagccccgccaccctcagagagcatggagggaccttcccttgtcagggactcctgagggcctgggtggccccttccatttcctggccctgctctgcttcctgtctacctcatactagaatgatcgtgactacccgggcagacattttactgtgtttctcagaccaagtgtctactgatggcccaaacatggagttttgtgggcttccactgtccccactccgaactcctgtatgtgcctggctgagtcacctaattcatactgtcatactagcataattatgactattgcatatgcttgttttgtttgactcttggctgctacgtcttgtagggcccctgaaaatccacttnctgccccagaaagggctttatttccactaggaggatatgcctanncaggcatctttctctgttacaatcacaggngaggnggattaacatctttttattaaaaacatnattaatgggggactgggtggganaaactttctaatgattntnaaaaaaaaattttttngctttactgccggcggcctcnaaggggaatcc

SEQ ID NO: 829 - DNA, 263 bp, Homo sapiens
  misc_feature 21, 91: n = A,T,C or G
ccttggttacacaactccagnaaccgggccccaaatccactatctgtgcaatgcagcacatgcgcacaatgctattaaactgctcttgganaaattccaggtttgtccggatgatgtccacacctggctgaacctgcaccaaggaaaaactctcccgcacatactcttctagccccgtgatcaatgtgtgggttgccatccggatgttactgggtgtgggctcctgaccacccaggtagtgcttggtggaagaaggatcgcaa

SEQ ID NO: 830 - DNA, 301 bp, Homo sapiens
  misc_feature 181, 184, 191, 222, 237, 246, 250, 268, 270, 296: n = A,T,C or G
gaagctgatggggtcaaatgaaggtgaattcaaggctgaaggaaatagcaaattcacctacacagttctggaggatggttgcacgaaacacactggggaatggagcaaaacagtctttgaatatcgaacacgcaaggctgtgagactacctattgtagatattgcaccctatgacattggnggncctgatnaaaaattgggtggcccttggcctctgtttgntttttataaaccaanctctatctnaaancccaacaaaaaaaattcncnccatatgggcccctcttgtaataatnttgac

SEQ ID NO: 831 - DNA, 430 bp, Homo sapiens
  misc_feature 262, 270, 309, 349, 362, 372, 425: n = A,T,C or G
aaataggtagaaactttatttcctaaatccctccctggacctctttcagaaggcagttcaaatgcactgtaggtagaaggcagaggaagcccttatttagcaatgcagaacttggcagaggccccacatctgtcattcttcacagcagtcccttcccacatgctagagggaaggggaagcatgatagggaggtccacttttgtggactcaaaccttgatggggatgttgagcagtcacaacgcttctcagaaaaggcacaancaccccanacattcagcccggaaaacaagctggctcacaggcttccnatcgggtgttcaaccttcttcggaacaaggcccagactgnccggcggccgtcnaaggcgaatncaccactggcgccgtctatggatccactcgtccaacttgcgaatatggcatanttttc

SEQ ID NO: 832 - DNA, 373 bp, Homo sapiens
caacagtcgctccctggacctggacggcatcatcgctgaggccaaggcgcagtatgaggagatggccaaatgcagccgggctgaggctgaagcctggtaccagaccaagtttgagaccctccaggcccaggctgggaagcatggggacgacctccggaatacccggaatgagatttcagagatgaaccgggccatccagaggctgcaggctgagatcgaaaacatcaagaaccagcgtgccaagttggaggccgccattgccgaggctgaggagcgtggggagctggcgctcaaggatgctcgtgccaagcaggaggagctggaagcccgccctgcagcgggccaagcaggatatggcacggcagacctgccc

SEQ ID NO: 833 - DNA, 366 bp, Homo sapiens
  misc_feature 356, 357, 358: n = A,T,C or G
gcaagacagtgattgaatacaaaaccaccaagacctcccgcctgcccatcatcgatgtggcccccttggacgttggtgccccagaccaggaattcggcttcgacgttggccctgtctgcttcctgtaaactccctccatcccaacctggctccctcccacccaaccaactttccccccaacccggaaacagacaagcaacccaaactgaacccccccaaaagccaaaaaatgggagacaatttcacatggactttggaaaatatttttttcctttgcattcatctctcaaacttagtttttatctttgaccaacccgaacatgaccaaaaaccaaaagtgcattcaaccttacccnnnaaaaaaaa

SEQ ID NO: 834 - DNA, 523 bp, Homo sapiens
  misc_feature 424, 437, 473, 483, 484, 489, 496, 498, 502, 514: n = A,T,C or G
aaatgttaatacaacaggatttttttttctttttgtaagagaaagcaaatctgtacaaaaatactctggttgcaagaaaagctagggcacactgttcaactaagagtagtttagctgttggaaaaataagagcatttaattttatctaaaaatatgtataaatcccctcaaaatggtaatgaatcatacacagtacatactaaaaatatttaaaatagagaatattcctcacagaggacttttttctttaattactgctaaaaaaataattacaaagtccaaacaggcagagagatttagcacactgatcacacgattctccatcatcctccacgcttgctctgaagagggtttaaaaagtccagtttctcgttgatttcgctgctccatttagccaaggttggctggacctgcccgggcgccncttcgaaagggcnaattcccacccactggcgggccgttactaatggatnccaactccgnnccaantttgggngnaatntgggcataactngttcctggg

SEQ ID NO: 835 - DNA, 238 bp, Homo sapiens
aaaaatccatgacaccttgatagaaattagagtttacacaaacaaaaaaggaaccttcgatattgccagcagctataaagtgaacgtactgagaccgacaggacagcaagaaggcatttgcacatttatatctgacacccgaccatactttcagtcaccagaatatcttctctccagatttaaaaaaatagtatgctgatttctataacaaagctttttttcgtacaaaaatcaaata

SEQ ID NO: 836 - DNA, 671 bp, Homo sapiens
  misc_feature 17, 448, 459, 478, 480, 526, 535, 549, 560, 568, 569, 581,588, 592, 593, 606, 609, 645, 652: n = A,T,C or G
ccaactatgcctctcanaacatcacctaccactgcaagaacagcattgcatacatggatgaggagactggcaacctgaaaaaggctgtcattctacagggctctaatgatgttgaacttgttgctgagggcaacagcaggttcacttacactgttcttgtagatggctgctctaaaaagacaaatgaatggggaaagacaatcattgaatacaaaacaaataagccatcacgcctgcccttccttgatattgcacctttggacatcggtggtgctgaccaggaattctttgtggacattggcccagtctgtttcaaataaatgaactcaatctaaattaaaaaagaaagaaatttgaaaaaactttctctttgccatttcttcttcttcttttttaactgaaagctgaatccttccatttcttctgcacatctacttgcttaaattgngggcaaaaganaaaaagaaggattgatcanancattgggcatacagttcattaacttcttcccccttccccaaaattnaattttttnaaccccttaccctntatggaaaagnaacctttnngaaaccccaatnaaattgnaaannaaaccctaacttnccncttgggttttaattttccaaaggaaattcctcccgngggcttnaaagggaaaccccctgggg

SEQ ID NO: 837 - DNA, 267 bp, Homo sapiens
  misc_feature 5, 15, 25, 33, 35, 40, 46, 51, 56, 63, 70, 79, 87, 94, 118,120, 135, 165: n = A,T,C or G
tacangaacaactgntacacattcnaagaacangnattcnctgcantctcntgatntgacctnatggganggacagganaatgagancactctnccaccacttttcctgccttggatntntatgaggatttgtgnctgctctaattggttattcctatatcatgncctactaaggtacctgcttataggccatgaaaataaaacgccattcaactttttttttgtaaagctaaaataatcacatgatacttattctttggaggattt

SEQ ID NO: 838 - DNA, 63 bp, Homo sapiens
ctgtttcccagcaaagatcaacctctgctggtcaggagggatgccttccttgtcttggatctt

SEQ ID NO: 839 - DNA, 567 bp, Homo sapiens
  misc_feature 380, 389, 418, 429, 431, 436, 469, 499, 506, 507, 522, 525,532, 540, 546, 553, 558: n = A,T,C or G
ccaccaacagtttcccagccacatgctgggccctctaggtctctccagcccactctaaggacccaagaaatgcagccacagtccatctctcttttttctctccttccgggggaccaaggtaccttctggggcatacaacatggcagcagggcctcgggaagaggggtaggaggaccgagcagcattctctgtagaggaagacaggaaaggagaccctcttggcgatgaattaatccttgaaggaaatgacattgagcttgtttcaaattcagcggctttgattcagcaagccacaacagttaaaaacaaggatatcaggaaatttttggatggtatctatgtctctgaaaaaggaactgttcaacaggctgatgaataanatctaaganttaccttggctacagaaagaaaatgccanatgaccttaananctacnttgggatatttaccttgccccgggcgggccaanggcgaaatttccacacacttggggggccgntacttannggaatcccaactttnggnacccaanctttgggngaaaanattgggnaatanctttttccc

SEQ ID NO: 840 - DNA, 284 bp, Homo sapiens
aaaggaatggattttgagagaaaacaacgtgggcagaagtatggaatagaaaataaatacaaatgtaggctattctgctaattgttttataaccacgacaaactagtacagagaatgccctgtacaaaacacaacaaaggttcaaacatcgagatgttcccttagcaaggctgaaaatttcagtctctggtatttggaatttaggctgcagtccttgtttttggatggatcactgggtgtgtggcacagtccatgcttttaaccagatttgaacagaagaatgg

SEQ ID NO: 841 - DNA, 340 bp, Homo sapiens
aaacctgatttactagacctgggaattttcaacatggtctaattatttactcaaagacatagatgtgaaaattttaggcaaccttctaaatctttttcaccatggatgaaactataacttaaagaataatacttagaagggttaattggaaatcagagtttgaaataaaacttggaccactttgtatacactcttctcacttgacattttagctatataatatgtactttgagtataacatcaagctttaacaaatatttaaagacaaaaaaatcacgtcagtaaaatactaaaaggctcatttttatatttgttttagatgttttacctgcccggcggc

SEQ ID NO: 842 - DNA, 539 bp, Homo sapiens
  misc_feature 363, 407, 418, 440, 514, 526, 528: n = A,T,C or G
aaaaatgttttcccgtgggtaattttctattatatattttcatatgggcaaagggaaaaaatgataaatcctctgtaatcacaaaccccaatttcgttttgtttattcagcttctaaaatattgaacacccagacttttaattcaacctttaagaaccttatcatttatgtttcagtagatatcaaagtaatccatgtttgtgtcaaatgatcatagaaaataaatagaagagacagtgaagcaagtaaaaagaaaagcattgttttaatttgtttgcattaatttttttcatttgtcaaaatgcttcttttgttgccacagtaaagaacagtttttattgttttgtaagtaaaattacgtancttattttgtatgtaaagattaatttccataataaaaatattgnatggttactgngatcttaatgggcaggggtaanaaagtatttacctcggccgcgaacacccttagggcgaaattccaccacactggcggggcggtactaatggaatnccaacttcgggnanccaaactttgg

SEQ ID NO: 843 - DNA, 626 bp, Homo sapiens
  misc_feature 443, 459, 467, 545, 558, 572, 591, 596, 597, 603, 608, 613,616: n = A,T,C or G
atcagtagagaattcaggatagttttgtttaaattcttgcagattacatgtttttacagtggcctgctattgaggaaaggtattcttctatacaacttgttttaacctttgagaacattgacagaaattatgcaatggtttgttgagatacggacttgatggtgctgtttaatcagtttgcttccaaagtggcctactcaagaggccctaagactggtagaaattaaaaggatttcaaaaactttctattcctttcttaaacctaccagcaaactaggattgtgatagcaatgaatggtatgatgaagaaagtttgaccaaatttgtttttttgttgttgttgttgttttgaatttgaaatcattcttattccctttaagaatgtttatgtatgaagtgtgaagatgctagcgaacctatgctcagatttcatcgtaagtctnccttccctgtacagantttcaaancggcactgatagtatgtatttctttataaaaaaggggtaaaaatacaatgaacttttacctcggccggacacccttanggggaaatccacncactgggggccgtnctaagggatccaacttggncccannttgggnaaaangggcnaanttttcccggg

SEQ ID NO: 844 - DNA, 297 bp, Homo sapiens
aaaaatctaaaagtttattgccagaatagcaaacttcataaagacaccttaaagtacatcgaatatgacaagcaaaataaacagaaaactttgaccaaagaaaagattgccgctgtcatgcacagtcaaattaataccaaaccaaacaagtacatcgaagagtatatgggttatacaatccacactctgaaactaaaggagactcattccaaaatgcttggttttgggttgggggtttgagaggggggctggtgctgggagggtaattttctcctaatacagaatatggaaatattt

SEQ ID NO: 845 - DNA, 580 bp, Homo sapiens
  misc_feature 373, 446, 480, 482, 491, 494, 498, 544, 553: n = A,T,C or G
ccagttttgattgcaaatgctgtaaagatatagaatgaagtcctgtgaggccttcctatctccaagtctatgtattttctggagaccaaaccagataccagataatcacaaagaaagcttttttaataaggcttaaaccaagaccttgtctagatatttttagtttgttgccaaggtagcactgtgagaaatctcacttggatgttatgtaaggggtgagacacaacagtctgactatgagtgaggaaaatatctgggtcttttcgtcagtttggtgcatttgctgctgctgttgctactgtttgcctcaaacgctgtgtttaaacaacgttaaactcttacctacaaggtggctcttatgtacataagttgntaatacatccaattaatgatgctgacatgctatttttgtagggagaaaaatatgtgctaatgattttttgaanttaaaatatcttttggggaagattgcttaaaaantnccctttttnttncaangcttatcttggacaaacttatgccggcttaaaatattttaaaaaanaaaactggnttggaacaaaaaaaaaaaaaaaaaaaa

SEQ ID NO: 846 - DNA, 345 bp, Homo sapiens
  misc_feature 336: n = A,T,C or G
atcgccattatccccagcaaaaagctccgcaacaagatagcaggttatgtcacgcatctgatgaagcgaattcagagaggcccagtaagaggtatctccatcaagctgcaggaggaggagagagaaaggagagacaattatgttcctgaggtctcagccttggatcaggagattattgaagtagatcctgacactaaggaaatgctgaagcttttggacttcggcagtctgtccaaccttcaggtcactcagcctacagttgggatgaatttcaaaacgcctcggggacctgtttgaattttttcttgtagtgctgtattattttcaataaatctngggacaaca

SEQ ID NO: 847 - DNA, 71 bp, Homo sapiens
  misc_feature 8, 12, 23, 27, 32, 38: n = A,T,C or G
ggcagggngganactcaatttgntgangaaanaaaacntccattaaaggataaataaaaacccaatttatt

SEQ ID NO: 848 - DNA, 226 bp, Homo sapiens
ggatactcagtttgttgaggaaataagacgtcaatgaagggataaataagagcacaatttattgcatggtaagtgtcagatgaacagtacaatttgtgctttagaaattcagagaacagaagggtatcattgtagctgggtgcggtggctcacgcctgtaatcccagcactttcagaggccgaggcaggcgggtcacttgagttcaggagttcaagaccagcctgg

SEQ ID NO: 849 - DNA, 237 bp, Homo sapiens
  misc_feature 209, 211, 222, 227: n = A,T,C or G
gtttaatgtgttgtaagacgtagagtttatctcaagctgttaaaaatggtaatgtacaaatgtgaatagacacttatctatataatatgggtaagttttgtttcgcctataatagatgtttataaaaacaagtgaggggacagttggtctttttatcttttctttctttttctttcttttctttttttctttttttttttttttttttngncccccccgggngcccntttgaaaaaa

SEQ ID NO: 850 - DNA, 190 bp, Homo sapiens
ctgtatcatctagacgcttatatcccgctgcagatcaactctcatgagagcaaggcagccttccaccggaagagaaagcaattaatggtggccacatctcccattagctctagcatgaaacctgtacagacaatgtttgtttcttttgtaaaaagcagtaagttatgcccagtaactaaatgaattcaaa

SEQ ID NO: 851 - DNA, 525 bp, Homo sapiens
  misc_feature 197, 200, 203, 207, 240, 249, 252, 256, 268, 274, 276, 280,302, 309, 321, 386, 457, 477, 495, 499, 500, 511, 514, 520: n = A,T,C or G
aaataagtttatgtatacatctgaatgaaaagcaaagctaaatatgtttacagaccaaagtgtgatttcacactgtttttaaatctagcattattcattttgcttcaatcaaaagtggtttcaatattttttttagttggttagaatactttcttcatagtcacattctctcaacctataatttggaatattgttgnggnctnttgntttttctcttagtatagcatttttacctgcccnggcggccgntcnaaanggcgaattccancacacntnacgncttaatttcttttttttcaaanaactaanttctgggggagntgatattcttttcaggttgatacgtcttttcagggactgcaaggggaccataaaggtactaatgntattaatgtgactgacaagtaattagaaactgggaaattaaattttacaaacatttttacctgccccggcnggccctcgaaaggcgaaatncacacactggcggccgtnctannggatccaactnggncccaancttgg

SEQ ID NO: 852 - DNA, 504 bp, Homo sapiens
  misc_feature 387, 401, 408, 421, 440, 467, 477, 478, 482, 491, 499: n = A,T,C or G
aaacctttggaagtttgggttttaaacttccctctgtggaagatattcaaaagccacaagtggtgcaaatgtttatggtttttatttttcaatttttattttggttttcttacaaaggttgacattttccataacaggtgtaagagtgttgaaaaaaaattcaaatttttgggggagcgggggaaggagttaatgaaactgtattgcacaatgctctgatcaatccttctttttctcttttgcccacaatttaagcaagtagatgtgcagaagaaatggaaggattcagctttcagttaaaaaagaagaagaagaaatggcaaagagaaagttttttcaaatttctttcttttttaatttagattgagttcatttatttgaaaccanactgggccaatgtncacaaanaattcctggtcancaccccccgaacttgcccngggcgggcccttaagggcgaaattccnccacactggnnggcngttcctaanggaatccnaactt

SEQ ID NO: 853 - DNA, 533 bp, Homo sapiens
  misc_feature 13, 16, 25, 29, 36, 85, 105, 167, 256, 296, 323, 330, 334,335, 355, 372, 396, 417, 428, 429, 441, 446, 448, 457, 471,475, 478, 484, 488, 493, 494, 511, 523: n = A,T,C or G
aactcaaaattgncanatcaactancttngcttttngcctttggaaaactaccattattcaaatttattatgtaatacactcatncagataatgaaacatctgcnaaaagaagtgtgggaatcacctcatctgtgcataaaatggctattatacatgaatgcagacntttgaagttagaaaggaatataactcaaatagcaaaaggtcctaattacagagtttacaaataagcagttgtattttcaaaagtcatantaagtccagactgggctattgccaaagaactaatctttantctacttcaacatgttacatgggattnctgactnttcnnactattaacattttgtgganggtaacttcctaaaggnccccaaaaaacaggaaacattccnggaattaaaggcttcctcttnaaaaaacaagnngggaaaccaatngggcnangaacctttncccgggggggcccntttnaancccctntttnggggnncttttttaaaagggggnaatttccccccnccttgggggg

SEQ ID NO: 854 - DNA, 124 bp, Homo sapiens
ccttaggctggacctaaatagattgatttcatttctaaccatccaattctgcatgtattcataattctatcaagtcatctttgattcctggacctaataaattttttttccctttcaaaaaaaa

SEQ ID NO: 855 - DNA, 240 bp, Homo sapiens
  misc_feature 209, 211: n = A,T,C or G
cctaccgcagcctgctcgagggacaggaagatcactacaacaatttgtctgcctccaaggtcctctgaggcagcaggctctggggcttctgctgtcctttggagggtgtcttctgggtagagggatgggaaggaagggacccttacccccggctcttctcctgacctgccaataaaaatttatggtccaaaaaaaaaaaaaaaaaaaancntcccgggggggcctttcaaagggggaaat

SEQ ID NO: 856 - DNA, 695 bp, Homo sapiens
  misc_feature 368, 431, 459, 465, 472, 507, 514, 522, 548, 550, 558, 585,591, 592, 612, 622, 631, 634, 652, 656, 678: n = A,T,C or G
cctcagcataattcttcaggtgcatctcctaggagagtccgtcatgattcaccagatccctctcctcctaggcgagcccgtcatggttcctcagatatctcttcccccagaagggtccataacaactcccctgacacatctaggaggactcttggctcttcagacacacagcaactcagaagggcccgtcatgactcccctgatttggctcctaatgtcacttattccctgcccagaaccaaaagtggtaaagccccagaaagagcctctagcaagacttctccacattggaaggagtcaggagcctcccacttgtcattcccaaagaacagcaaatatgagtatgaccctgacatctctcctccacnaaaaaagcaagcaaaatcccattttggagacaagaagcacttgattccaaaggtgactgccanaaagcaactgattcaaaactttcttctncccggnataaacnaaatccagggcccaggattcttaattcaaattttnaccttcncggaatanaactaaaaacccggaactttttattntnaacctctnttcccccaggggggaaaaccgaaggancccaannttttttaatttttacctttncccccccccnaaaggaaanaanccttcttggaaaaaaagntttncaacaattttttttgggggctnaaaaagggggggggggt

SEQ ID NO: 857 - DNA, 409 bp, Homo sapiens
ctgccaagatggagaagcatgtgcccctgtagagcgtctccccagaaccagaccccgagccactcgcttcctctgtgctgtgacaacattggtgccaggggagatggtgtttttcaaagggacctactgtagccactttaatttacaattaagagccttagtttgacttaacacttttgtaggcttttcattgtgtatttttgtgtatgtgtgcatatagcagctactctgtagcagaggtgggtagagacacttaatagtatcatgtcgcatgcagatgtcacatcggcctctgcaaaaactgtactgtcttgtttctgcattagacttaagtagtcatgtgaatatactgctatgtcacttttaatattacgagttttatacttggaaaatggtacttgcttctttt

SEQ ID NO: 858 - DNA, 344 bp, Homo sapiens
ggaattctttgtggacattggcccagtctgtttcaaataaatgaactcaatctaaattaaaaaagaaagaaatttgaaaaaactttctctttgccatttcttcttcttcttttttaactgaaagctgaatccttccatttcttctgcacatctacttgcttaaattgtgggcaaaagagaaaaagaaggattgatcagagcattgtgcaatacagtttcattaactccttcccccgctcccccaaaaatttgaatttttttttcaacactcttacacctgttatggaaaatgtcgacctttgtaagaaaaccaaaataaaaattgaaaaataaaaaccgtaaaa

SEQ ID NO: 859 - DNA, 552 bp, Homo sapiens
  misc_feature 369, 401, 404, 407, 421, 462, 468, 480, 521, 527, 534, 535,538, 544: n = A,T,C or G
ccggagtccatagcacatattggggatgtgatgtttactgggacagcagatggccgggtcgtaaaacttgaaaatggtgaaatagagaccattgcccggtttggttcgggcccttgcaaaacccgagatgatgagcctgtgtgtgggagacccctgggtatccgtgcagggcccaatgggactctctttgtggccgatgcatacaagggactatttgaagtaaatccctggaaacgtgaagtgaaactgctgctgtcctccgagacacccattgaggggaagaacatgtcctttgtgaatgatcttacagtcactcaggatgggaggaagatttatttcacccgattctagcagcaaatggcaaagacnagactacctgcttctggtgatggagggcacanatnacnggcgcctgctggantatgatactgtgaccagggaaataaaatttttttggaccanaacttnggcccgaacacncttaagggggaatttcaacacacttggcgggccgtacttantggatnccaactnnggncccaancttggggg

SEQ ID NO: 860 - DNA, 148 bp, Homo sapiens
ctggggtggggggatgtagcctacctcgggggactgtctgtcctcaaaacgggctgagaaggcccgtcaggggcccaggtcccacagagaggcctgggatactcccccaacccgaggggcagactgggcagtggggagcccccattgt

SEQ ID NO: 861 - DNA, 592 bp, Homo sapiens
  misc_feature 436, 551, 557, 560, 571, 572, 582: n = A,T,C or G
cactgttcttgtagatggctgctctaaaaagacaaatgaatggggaaagacaatcattgaatacaaaacaaataagccatcacgcctgcccttccttgatattgcacctttggacatcggtggtgctgaccaggaattctttgtggacattggcccagtctgtttcaaataaatgaactcaatctaaattaaaaagaaagaaatttgaaaaaactttctctttgccatttcttcttcttcttttttaactgaaagctgaatccttccatttcttctgcacatctacttgcttaaattgtgggcaaaagagaaaaagaaggattgatcagagcattgtgcaatacagtttcattaactccttcccccgctcccccaaaaatttgaatttttttttcaacactcttacacctgttatggaaaatgccaacctttgtanaaaccaaaataaaaattgaaaaataaaacctaaacatttgccccttgtggcttttgaatattttcacagaggaaattacctgcccggcggcctccaaaggcgaattcacacctgnggcctntanggaccacttgnnccacttgggnaatatggcta

SEQ ID NO: 862 - DNA, 332 bp, Homo sapiens
  misc_feature 80, 134, 176, 199, 203, 232, 288, 300: n = A,T,C or G
ataagggctgtttttgctgccccaaaagggcttaacaatttaggcggatagtttacttaaaaaaaaaaaatcctttgganacatactgaaaatgcaaactagtttctaaattatcaattccctacatgaaaaancagtttgccaaagtttagtctcaaaaaatgactggttggctntatttaaatcaaaacccaatttntacncgtgttgaataaggtaacagcctttgatnaatttccttcacaacatggttttagtgaagcaaacatttttttttaagggcattgntctttctagttnatttctttttatgaaataaaattattttattt

SEQ ID NO: 863 - DNA, 297 bp, Homo sapiens
ccttggtttaattgcaggcgcattgaacagtcctgggcactacatgtaaattaagcccaaagatggggagaaaggaaaaggagagacaaatatagtccatactgagagtcatcaacaatccagactgaagtcttctattttaatctcaatccccttttctgatttgccacccatgcctcttcaggctggaaacaatctcttggttccctaaagcactttcttctgactgctgtgattcagtgaaccttgccctttgctttctattacttgtgcatttgcctcacctgacaatgtttt

SEQ ID NO: 864 - DNA, 79 bp, Homo sapiens
gtgtctaaaaatccattccctctgccctgaagcctgagtgagacacatgaagaaaactgtgtttcatttacctcggccg

SEQ ID NO: 865 - DNA, 98 bp, Homo sapiens
tagaaattgagatgcccccccaggccagcaaatgttcctttttgttcaaagtctatttttattccttgatatttttctttttttttttttttttgggg

SEQ ID NO: 866 - DNA, 582 bp, Homo sapiens
  misc_feature 397, 404, 414, 426, 513, 518, 528, 545, 567, 568, 569: n = A,T,C or G
aaaatatttcccctagttttttggggggataggaagaaagatttgttactgtatttttttaactacataaaaatagatcaataaatgtcagcattggcctctgtgtacaaaccaagagcttttacagatccagaatttattagtttaaaatgcaggtgaacttttttttgcgtttggtttacttgtctgtcaaatgtttccttaaacatgaaactgaataaggagaagagtatttttaacacttaaatttcttggcaaattttaaaacattttttagtctgtaatacactccacttgaagcacttaagtcttccttaaatgacttttcttaagtaatgatactgtgtgttttcccaaagcacttttaaaaaaatttttataaattactatctgttgnaaaaggnggcccttttncctttcttctanaatttttttcttaccaaaatttccctaatctttgaaaggtttggggaaatttaaaatttcaaaatggccaaaaaaccttgacctcantttanccttgccccngggccgggccccttttnaaaaaggggcaaaatttcccannnccctttggggggg

SEQ ID NO: 867 - DNA, 663 bp, Homo sapiens
  misc_feature 13, 32, 38, 64, 400, 496, 521, 537, 548, 550, 551, 576, 580,588, 602, 605, 610, 619, 625, 626, 636, 637, 646, 652, 654,659: n = A,T,C or G
aaacattacccancatcattgtttataatcanaaactntggtccttctgtctggtggcacttanagtcttttgtgccataatgcagcagtatggagggaggattttatggagaaatggggatagtcttcatgaccacaaataaataaaggaaaactaagctgcattgtgggttttgaaaaggttattatacttcttaacaattctttttttcagggacttttctagctgtatgactgttacttgaccttctttgaaaagcattcccaaaatgctctattttagatagattaacattaaccaacataattttttttagatcgagtcagcataaatttctaagtcagcctctagtcgtggttcatctctttcacctgcattttatttggtgtttgtctgaanaaaggaaagaggaaagcaaataccaattgtactatttgtaccaaatctttgggattcattggcaaataatttcagtggtggggtattattaaatanaaaaaaaaattttttttctaaggtnaaggctaattgaaacntttgacttatnannacaattttcctttcaaataaattcnttcnaaaaaatnaaaaaaaaacttgnccnaaccncctaagggnaattcnncactggggcnnttaatggancaaccngncaacntggg

SEQ ID NO: 868 - DNA, 251 bp, Homo sapiens
ggaaaaccaaacatgctttatttcatttttttcacaatttatttaaacatctcacatatacaaaataggtacaatttaatttttctgcttgcccaagaaacaaagcttctgtggaaccatggaagaagatgaaaatgagactggcaaagaacaaatgctgaatctgaagaagaggacaactttgggcaaataatctgcatacttttaattgggaataagatggaaaatatgaatgctaaatcaaatttttt

SEQ ID NO: 869 - DNA, 143 bp, Homo sapiens
aaatgttgaatattcccttgtatggatataccacaattcatttacccatttacttgttgatgacatttgggttgttttagttttgggatattacaaataaagctgctgtgaacatttgtgcaaaaaaaaaaaaaaaaaaaaaa

SEQ ID NO: 870 - DNA, 228 bp, Homo sapiens
  misc_feature 1, 2, 4: n = A,T,C or G
nngnatgtttttattaaaaaaaattaaagaccttcatggcacaacttcttcccagcacagttatggtttagtcataccaattacaatacaattacaaccaataaagcaaggtggggagggccttctggcttcaaacttaaaaaaaagcagaggaagaggggagggaccacttcaaacaaagtttaaaaaatctttcagagtaattgccaacataacctttcatgttgg

SEQ ID NO: 871 - DNA, 696 bp, Homo sapiens
  misc_feature 5, 395, 427, 476, 530, 542, 543, 565, 613, 625, 637, 643,663, 670, 681, 690: n = A,T,C or G
ctgangattagctaatctaagaacttgaagctcccgtttaaggccttgctctgtctcagcacctgttgttcaaggtcttcattgtatttgttaactttttgttctctctctgttgcttcttttacaagctgtttaaggtcagtaatgctttgattttttttggcaatatcagtttccaattcttttaacttggtttcatacattcttgtaaccacaatggatttccagctcttactgtcagcaccttcaagctgtggacctctgctttctgcaaactgcaatctcttaccagtctcttctagttgaactgtcatcttctcatttaatatctctaaattattctttgctatcccgtaatttctctgcacatcagtttcttttttaagttctttacnaacctttcattttcagcaataattttttctgngcctttggtcttggattcatagtgcatgctcaactgatgcccaaaaganctttaagttttctaattcagccttcaattttcattttcctgctcaaaataaccnatttttcactanncaatattcctgaagcttttttnactggtcatttctctctggacttttcacacttttttcattaaacccanggttttttccanttttggaatggnttttcncttttaccaaacctttaaanggacctnccggggggccnttaaagggnaatccc

SEQ ID NO: 872 - DNA, 206 bp, Homo sapiens
ccagataagctaggatgagagcagagactcagtgtgtgggtgtcccttcctgcttccccttcaggtcttggtttgttctgaagggacgttttatagtcactatccacatgccagtgtgaaatgggcatctatgacgtggtcagggtgtccattcctaatcatggggcagatgccacaagcattcagaaaggagtctgaaagggtgg

SEQ ID NO: 873 - DNA, 575 bp, Homo sapiens
  misc_feature 438, 440, 473, 485, 497, 520, 521, 542, 551, 564, 567, 571: n = A,T,C or G
ttttttttctaaagagaaaaaatttttattgtgatataaaatgcacttataaaatgtccaccagaaggcatgtaatccttcactgctatataaatttactgggaatatgttattcaccatctaggtatgatactgccaactaaaacatactgtaaacgatgagttatactctataacaaatgcatcactgattttcagcaatcattggtttaataataattagtttaagactataatcacatctatattctggaatgtccatttactttaatgtagtgtagtggaatttagagtataattgcacatagatggtacagaaaaacattcacttctaaattattttataccttcatgacaggtagtcttcctgactgaaaataacagcttcagctatggtctgctccaggattcttaatgcaataatttgggtgtatgtgngnctgctacctgacccccatggaacaacttatatntttataaacaangcaaaattttgncagttattttgcatggttacctnncccggcgggcctttaaaaggnaaaatccancaattggggggcnttnttanggaa

SEQ ID NO: 874 - DNA, 226 bp, Homo sapiens
ccactgcctctgcagtatcaaagagaattagtctttccacaaaacaaattttaacagccaatctctggatttctgtagtggctttagtcaggcatatttatcatcatattagcagtgttcagttcctgcccaacatctttatttaatcccaattcaatgcttatggatgctcagctcatgtttaatgttgcaagccccatcttagcccatcttaattcaaacagaa

SEQ ID NO: 875 - DNA, 566 bp, Homo sapiens
  misc_feature 378, 511, 514, 531, 545, 555, 562: n = A,T,C or G
gtgttattcatggggcagataaacaaaccctgaagagtatacaaaagaaaccatgcaaagcaacgactactttgctacgaagaaagactcctttcctgcatctttcatagttctgttaaatatttttgtacatcgcttctttttcaaaactagttcttaggaacagactcgatgcaagtgtttctgttctgggaggtattggagggaaaaaacaagcaggatggctggaacactgtattgaggaatgaatagaaaggcttccagatgtctaaaagattctttaaactactgaactgttacctaggttaacaaccctgttgagtatttgctgtttgtccagttcaggaatttttgttttgttttgtctatatgtgcggnttttcagaagaaatttaatcagtgtgacagaaaaaaaaatgttttatggtagcttttactttttatgaaaaaaaaattattttgccttttaaattcttttcccccttccccttccaaagtcttgatagccaancgnttttttttggggggaanaaaccggggaaaantctaaccccntttgggntttt

SEQ ID NO: 876 - DNA, 136 bp, Homo sapiens
ctgctacatgcggtggagtgtccacaatttgccggtcatctgaggagccacctcgcttcaggtcaatgactggggcgaggactgtactttgtttcgtcctttggctctttgcctgagtgagagctgccttcttcac

SEQ ID NO: 877 - DNA, 499 bp, Homo sapiens
  misc_feature 1, 2, 443: n = A,T,C or G
nnaatgttcatgtagaaaattaatgaactataggaatagctctaggagaacaaatgtgctttctgtaaaaaggcagaccagggatgtaatgtttttaatgtttcagaagcctaactttttacacagtggttacatttcacatttcactaatgttgatatttggctgatggttgagcagtttctgaaatacacatttagtgtatggaaatacaagacagctaaagggctgtttggttagcatctcatcttgcattctgatcaattggcaagaaagggagatttcaaaattatatttcttgatggtatcttttcaattaatgtatctgtaaaagtttctttgtaaatactatgtgttctggtgtgtcttaaaattccaaacaaaatgatccctgcatttctgaagatgtttacctcggccgcgaccacgctaagggcgaattcanccacttggcggccgtctaatggatccaactcggaccagcttgcgaatcatggcata

SEQ ID NO: 878 - DNA, 484 bp, Homo sapiens
  misc_feature 16, 175, 236, 339, 389, 394, 395, 400, 444: n = A,T,C or G
gctgcgagggccgaanctaagctctcacgtctggccgccttcaggctccgcacacacaggaagcaaaagctaaggcagagttgaaaatgtgtttaaccgcggaagggctgaccccacatgcacacagacccttctacaaactctgggagggttttatgggtttttttgattccanatgtttaaggaaatctctgtcctatcactgaccctgggctaaaagaataggaagaaacggncatacgtgacaaaaaatacagactttacaaccagaaaagtcattaaacaaataactactgcaacaaacaagcaaagaaccaaaccccgggaaaaggggcgtanggatcatttttttccagaatttgctaccattattaatatttcttaaacancccanntttancctcggggccgcgaaccaccccttaaggggcgaaatttccagcnccacttgggcgggccgttacttagtgggaatcccaacttc

SEQ ID NO: 879 - DNA, 259 bp, Homo sapiens
aaacttttccttcaagttatgggccacttcaaaaacagtgtggcattgagggtaggcaagtgggagaagggagacctggactgcagagtccagaagccagaactttgaactgtgcttctagctctttccagcagtgagaacttggaaaggtagactctttgcatctcaaccttctcatctttcaaaggggatgaataattccaatcacacaagaaaggactgaacaagatgaacaagatgatcactgtccaggcgccgg

SEQ ID NO: 880 - DNA, 621 bp, Homo sapiens
  misc_feature 481, 482, 495, 541, 542, 552, 553, 571, 581, 582, 589, 592,599, 601, 608, 613: n = A,T,C or G
gcgagaatgaagactattctcagcaatcagactgtcgacattccagaaaatgtcgacattactctgaagggacgcacagttatcgtgaagggccccagaggaaccctgcggagggacttcaatcacatcaatgtagaactcagccttcttggaaagaaaaaaaagaggctccgggttgacaaatggtggggtaacagaaaggaactggctaccgttcggactatttgtagtcatgtacagaacatgatcaagggtgttacactgggcttccgttacaagatgaggtctgtgtatgctcacttccccatcaacgttgttatccaggagaatgggtctcttgttgaaatccgaaatttcttgggtgaaaaatatatccgcagggttcggatgagaccaggtgttgcttgttcagtatctcaagcccagaaagatgaattaatccttgaaggaaatgacattgagcttgtttcaaattcaccgnntttgattcagcangccccaccagttaaaaacaaggatatcagggaaatttttggatggnntctatgtttnntgaaaaaggaacttttcngcaggctggnngaataanaanttagaantnccctggntcccnaaaaaaaa

SEQ ID NO: 881 - DNA, 357 bp, Homo sapiens
gccgctctggaccgtctcaaggtgtttgacggcatcccaccgccctacgacaagaaaaagcggatggtggttcctgctgccctcaaggtcgtgcgtctgaagcctacaagaaagtttgcctatctggggcgcctggctcacgaggttggctggaagtaccaggcagtgacagccaccctggaggagaagaggaaagagaaagccaagatccactaccggaagaagaaacagctcatgaggctacggaaacaggccgagaagaacgtggagaagaaaattgacaaatacacagaggtcctcaagacccacggactcctggtctgagcccaataaagactgttaattcctcaaaaaaaa

SEQ ID NO: 882 - DNA, 395 bp, Homo sapiens
  misc_feature 1, 2, 9, 17: n = A,T,C or G
nnctgctcnctgggcanacataccatgtggctgtggtctgctacctgacgtctcaggtcagagccacctaccatggaagtttcagtacaaagaaatctcagcccccacctccacagccagcaaggtcagcttctagttcaaccatcaatctaatggtgagcacagaaccattggctctcactgaaacagatatatgcaagttgccgaaagacgaaggaacttgcagggatttcatattaaaatggtactatgatccaaacaccaaaagctgtgcaagattctggtatggaggttgtggtggaaacgaaaacaaatttggatcacagaaagaatgtgaaaaggtttgcgctcctgtgctcgccaaacccggagtcatcagtgtgatgggaacctaa

SEQ ID NO: 883 - DNA, 294 bp, Homo sapiens
cgaagacctttgctctgctgctgctgtccctgttcctggcagtgggactaggagagaagaaagagggtcacttcagcgctctcccctccctgcctgttggatctcatgctaaggtgagcagccctcaacctcgaggccccaggtacgcggaagggactttcatcagtgactacagtattgccatggacaagattcaccaacaagactttgtgaactggctgctggcccaaaaggggaagaagaatgactggaaacacaacatcacccagagggaggctcgggcgctggagctgg

SEQ ID NO: 884 - DNA, 252 bp, Homo sapiens
ttcatttgaaaactgagccaaggtgttgactcagactctcacttaggctctgctgtttctcacccttggatgatggagccaaagaggggatgctttgagattctggatcttgacatgcccatcttagaagccagtcaagctatggaactaatgcggaggctgcttgctgtgctggctttgcaacaagacagactgtccccaagagttcctgctgctgctgggggctgggcttccctagatgtcactggacag

SEQ ID NO: 885 - DNA, 218 bp, Homo sapiens
aaaatcctgattttggagacttaaaaccaggttaatggctaagaatgggtaacatgactcttgttggattgttattttttgtttgcaatggggaatttataagaagcatcaagtctctttcttaccaaagtcttgttaggtggtttatagttcttttggctaacaaatcattttggaaataaagattttttactacaaaaaaaaaaaaaaaaaaaaaa

SEQ ID NO: 886 - DNA, 693 bp, Homo sapiens
  misc_feature 494, 511, 528, 550, 560, 566, 582, 593, 594, 598, 610, 626,641, 651, 675, 678, 690: n = A,T,C or G
ggaaaaaaaattagaggatgaagccaaaactaacacattctaaagaattgcaaggaaagcaactatgtaattctgttgaaaaaggaaagctcaggaaatactctttttatttcttttgattctagctgtctgcgagcctggctgtggtgcacatggaacctgccatgaacccaacaaatgccaatgtcaagaaggttggcatggaagacactgcaataaaaggtacgaagccagcctcatacatgccctgaggccagcaggcgcccagctcaggcagcacacgccttcacttaaaaaggccgaggagcggcgggatccacctgaatccaattacatctggtgaactccgacatctgaaacgttttaagttacaccaagttcatagcctttgttaacctttcatgtgttgaatgttcaaataatgttcattacacttaagaatctggctgaattttattagcttcattataaatactgactgatatttactcttncctttaagtttttaagncctctgtacatgatggnataaattttcttgtttcagtgntttgggacanattttntttatgtaattgttcnggtaaaatttnngggnggagtgggaaanttttcaaattccatcnttttggggttggggngggggacatnaaaaggtaattgggcaaaatgctnagnccaaaatttganggc

SEQ ID NO: 887 - DNA, 593 bp, Homo sapiens
  misc_feature 1, 433, 440, 496, 500, 502, 506, 533, 541, 549, 563, 570,575, 582, 584, 588: n = A,T,C or G
ngcgagagcttcaagagcaaagagtttgtgtctagtgatgagagctcttcgggagagaacaagagcaaaaagaagaggaggaggagcgaggactctgaagaagaagaactagccagtactccccccagctcagaggactcagcgtcaggatccgatgagtagaaacggaggaaggttctctttgcgcttgccttctcacaccccccgactccccacccatattttggtaccagtttctcctcatgaaatgcagtccctggattctgtgccatctgaacatgctctcctgttggtgtgtatgtcactagggcagtggggagacgtcttaactctgctgcttccaaggatggctgtttataatttggggagagatagggtgggaggcaagggcaatgcaggatccaaatcctcatcttactttcccgaccttaangatgtanctgctgcttgtcctgttcaaattgcttggaacagggggtcatgtgaaggccaggancttngnccgngaacccccttaggggggaattccagcncccttggnggccgttncttgtggatcccanctcgggncccancttgggngnaatnatggg

SEQ ID NO: 888 - DNA, 606 bp, Homo sapiens
  misc_feature 4, 346, 481, 500, 516, 568, 575, 579, 580, 589, 591, 599: n = A,T,C or G
gctnttcttggttccttcagtggtgttggtagtaaaatggtaggtaaaagttaggctgcaagttcaataaatcatgagatttcccatcgttacacccttgtgtattcacatttcttggatcaaacattttgagtgaactaggggtttttattaaagacatttgttgtatttatggttgtaactgtacatgcttatcaggatgagactgaaagaaggtagggcaaaaatggttgaatctattttcagatagtagttcatacttgagtgaagtgtcttgtctgcattatgaagcctggtatgtatccagtactaaataggtgggttaaatgtggtaattctagttcantgtcttaccctgaagagaaagttgtaggttggctgttgaaattcattccttagatatgatcaagtttgattgccccggctttattgcctttacaggaatgtgatactcagggcttactctatacaccaatgagtnttctttgatcctaagaacnccactgaagttggttnaggtctttggacaacatgaataaacttcttcaaaaacttttttttcctttgnaaggaangggnnttgcttcangntactaatnaaaaaaa

SEQ ID NO: 889 - DNA, 481 bp, Homo sapiens
  misc_feature 397, 408, 474: n = A,T,C or G
ttcaaagcctgtctgcgagcctggctgtggtgcacatggaacctgccatgaacccaacaaatgccaatgtcaagaaggttggcatggaagacactgcaataaaaggtacgaagccagcctcatacatgccctgaggccagcaggcgcccagctcaggcagcacacgccttcacttaaaaaggccgaggagcggcgggatccacctgaatccaattacatctggtgaactccgacatctgaaacgttttaagttacaccaagttcatagcctttgttaacctttcatgtgttgaatgttcaaataatgttcattacacttaagaatactggcctgaattttattagcttcattataaatcactgagctgatatttactcttcttttaagttttctaantacgtctgtancatgatggtatagaatttcttgtttcagtgctttgggacaaatttatattatgtcaaattgatcanggtaaaa

SEQ ID NO: 890 - DNA, 281 bp, Homo sapiens
  misc_feature 218: n = A,T,C or G
ccaaaaccaggctttgattgaaccaggatgaatgcgggtgtcggaagtagaatatatatatacatataaaattgaaactggcgatggaatatgagaggagccctctggaaagaaaaggacagaccctgtgctttcatgaaagtgaaaatctggctgaaccagttccacaaggttactgtatacatagcctgagtttaaaaggctgtgcccacttcaanaatgtcattgttagactttgaaatttctaactgcctacctgcataaagaaaataaaatctttt

SEQ ID NO: 891 - DNA, 153 bp, Homo sapiens
ccagccctgaagttgccctcccagggaggaaccagctctgggagggaggggctgtcagacctccagggcctggctgggatctctggtcaggaatgtgtgaaagggtggtggggagagaagatggcagcacccccaggcatgggctgcgagcag

SEQ ID NO: 892 - DNA, 203 bp, Homo sapiens
aaagtagttttctttaggaactgtcagcatgttgttgttgaagtgtggagttgtaactctgcgtggactatggacagtcaacaatatgtacttaaaagttgcactattgcaaaacgggtgtattatccaggtactcgtacactatttttttgtactgctggtcctgtaccagaaacattttcttttattgttacttgcttttt

SEQ ID NO: 893 - DNA, 211 bp, Homo sapiens
cggccgaggtaaatttgccagcagggaagtaaaataattatgggaagagtgtcttaagcctaatattaaatcagttttgttaaggggaaaactcaatagttctgttacttaggctgttagatccaagttgatttttgtgtctacagctaaattttgtttacaattaggctattttttaatataggatttagaaaccaagggtatgtgtttt

SEQ ID NO: 894 - DNA, 344 bp, Homo sapiens
ctgattttatttccttctcaaaaaaagttatttacagaaggtatatatcaacaatctgacaggcagtgaacttgacatgattagctggcatgattttttcttttttttcccccaaacattgtttttgtggccttgaattttaagacaaatattctacacggcatattgcacaggatggatggcaaaaaaaagtttaaaaacaaaaacccttaacggaactgccttaaaaaggcagacgtcctagtgcctgtcatgttatattaaacatacatacacacaatctttttgcttattataatacagacttaaatgtacaaagatgttttccacttttttcaattttt

SEQ ID NO: 895 - DNA, 402 bp, Homo sapiens
  misc_feature 34, 56, 65, 71, 77, 90, 97, 183, 204, 206, 246, 249, 260,323, 336, 351: n = A,T,C or G
ctgaaggagactgtggaaaaatataaacgagctntggcagacactgagaacttacngcacagganccaganattggnggaggaggcaaanttatacngcattcaagccttctgcaaggacttgttggaggtggcagacgttctggagaaggcaacacagtgtgttccaaaagaagaaattaangacgataaccctcacctgaanancctctatgaggggctggtcatgactgaagtccagatccanaangtgttcacaangcatggcttgctcaaattgaaccctgtcggagccaagttcgacccttatgaacatgacgcctngtaccccaccggntgaagggaagaccangcacatggccctactacaaagtggggacaagctgcttggccactctagacc

SEQ ID NO: 896 - DNA, 425 bp, Homo sapiens
  misc_feature 155, 164, 166, 170, 217, 220, 235, 261, 279, 286, 318, 326,335, 362, 400, 406, 410: n = A,T,C or G
ccaagaacgtgcaataaattggaagtttgccccggggcagcaagaatttatgctgccattgaagagcaggtaccagtgccccttttcagacagtttttgattcgctctagactttttttttttttaatagggagggaaaaaatttgataattttnttttttctncntgcncttaaaactaaaacacaggttgggataaatttatttgcttccttttnccntttttttccccaaancctgatgggaaaaatgtccagggcanggaaacccccttttttgnagggganaactcaaatgaaaattggggcttatttttacncttctctnttggggctnttttggggggctatctgttttaagggntcctttaaggcccctgggggccctggacctgcccgggnggcctnaaanggggaaattccaaca

SEQ ID NO: 897 - DNA, 172 bp, Homo sapiens
aaagcactcacataaatccatttcactcaaaaaggaaacataaagtgcttctagcagtacaagcacggttggcatggcctttccaaaggtcttccactagagtctagagaaatctaaatatagtcatccacaaactggatgtttttattttctgagccattagagattttca

SEQ ID NO: 898 - DNA, 516 bp, Homo sapiens
  misc_feature 270, 283, 301, 336, 358, 405, 410, 430, 441, 452, 463, 479,480, 485, 509: n = A,T,C or G
ccggattggagggagcacagatacaggcaaacatatcaaggagaatgactattatactccaactggggagttccgtgtggaccgtgaaggttctccagtgctgctcaactgcctcatgtacaagatgtgttactatcgctttggacaggtttacacagaaccaagcgtcctccagctttgaccgtgtccgaaaatgctgagattgggaataaagacttttgagcttgatgtcctggaggaaacatataccacagaacattggctggtcangatatacaaggtnaaaggacctggataatcnaagcttgtcaaggacataaatggcacgttcaactntgattgcttccacttagccatnacatttaagacgttgaaaaatttttttttttttttttttaatatcantttgnaaaaacaaaactggatgggnttaaaattttntggaaattttnttttgggcaanatgggctgggccaaannaaaanatttttttaattttaaaaagggtncccaaaa

SEQ ID NO: 899 - DNA, 449 bp, Homo sapiens
  misc_feature 262, 273, 311, 331, 353, 357, 402, 418, 424, 433, 439, 443: n = A,T,C or G
atgaagttcaatcccttcgttacctcggaccgcagtaaaaaccgcaaacgtcacttcaatgccccctcacacgtgcgcaggaagatcatgtcatccccgctctccaaggagctgcggcagaagtacaatgtccgctccatgcccatccgcaaggacgacgaaggtccaggtagttcgaaggacactacaaaggtcagcaaattgggcaagggtagtcccaggtggtaccagaaaagaaaatattgtcaatctaacatcgaancggggtggcanccgtgaagaaagggcccaaacgggcaccaaacttggtnccccgttggggccatttcanccccaaagccaaagggtggggnttantcacccaagggcttaaaaaacttgggaaccaaagggaattcgggnaaaaaaaaaaaatttntttggnaaaccgccnaaaagncccnaaattt

SEQ ID NO: 900 - DNA, 190 bp, Homo sapiens
aaatgaagtgattctaagatttggtttgggatcaataggaaagcatatgcagccaaccaagatgcaaatgttttgaaatgatatgaccaaaattttaagtaggaaagtcacccaaacacttctgctttcacttaagtgtctggccgcaatactgtaggaacaagcatgatctttgttactgtgatatttt

SEQ ID NO: 901 - DNA, 570 bp, Homo sapiens
  misc_feature 338, 373, 417, 469, 515, 520, 536, 558, 565: n = A,T,C or G
aaacatctcacatatacaaaataggtacaatttaatttttctgcttgcccaagaaacaaagcttctgtggaaccatggaagaagatgaaaatgagactggcaaagaacaaatgctgaatctgaagaagaggacaactttgggcaaataatctgcatacttttaattaggaataagatggaaaatatgaatgctaaatcaaattttttaaaaaatcaccacacgatacaactcaatacagggagtattctttctcaaaattctttcttacccccatcaacaattctttcaaagtattcttggaaaataccttatttaaatttaagcccccttttggtantttattgaaaccaaaaacccaaaaaccaaggggancccttcaaggtttcattcttcttggtcttaagggtccaagccanccctaaaccaattggtggggaatcaccaccttcatttgggggaaaaggtggnttttggaagggtaaattttacccttcggggccggcggaaaccaccnccttnagggggcggaaatttnccaaccaccccctttggcgggncggtttncttta

SEQ ID NO: 902 - DNA, 601 bp, Homo sapiens
  misc_feature 304, 309, 396, 400, 408, 409, 428, 456, 472, 477, 493, 506,513, 532, 536, 537, 544, 546, 568, 578, 590: n = A,T,C or G
ccatggatgtgccccaatacagtacacattttttggttaaatttgttttcagatcatttcatggaatctttgaagtatctttgactctaactttgacttggtggtggaccttccttggtttttataacacctaagagatatcctttagaattacatgtattttagcataaggaaattggaaaaagtaaaacatctgggttttttcaccaagaccatatggtaaataaaatagtgaaaatggtggtatgaagttcaagtaagaacctggaccctcaaccaatggttttccattaaaatatgccanaagtncttttcttttggaattgggtaatttaccaataattggttaaaattggaatgcatttgccatttctaaggaatctaaaagaattggantacnagaaaggnnccaattttattatttggangaaaaatatgaaaaattaccggggcccnatacctggttttgatnaaatnaaattggattttttanccttgggccgcgnaaccacnccttaaggggggaaaattncaannacacctntngcgggccgtactaaaggggaancccaacttcnggaaccaaaacnttggggggaaa

SEQ ID NO: 903 - DNA, 532 bp, Homo sapiens
  misc_feature 310, 354, 369, 426, 433, 439, 449, 476, 481: n = A,T,C or G
ctgggtaccattccgggtcatccgcagaaattcctcatagatggcaactctgtctactctccgagccagtggcgagaagttacacagggagtccaccccggtgtggtgcctgttggggacagacctgaatgttgaaacttgacagtcagaaaaataactcttgatgctgctgtttcggaaagagttggttgaaccgcatcctcaatattcctttttgttcctctgggtaattgggtgggtgcctggcttggcttttgtcctgggaaatatgggtaagggttgggtgaatgggtgaaaattcaagggtaanaaatgcctggggtggcttggaaccttctttggttgggttgaatnaacttggatgaactncatttcttgcacatgggattgtccacccacttgggaaggtggaacccaaccaatggnatgaagnatttangggccttatntaaaaaagaattgcttcccccagggtnggggncaaaatggaaggaaaacaatggccttgacagtgaccacaccggaatccatt

SEQ ID NO: 904 - DNA, 404 bp, Homo sapiens
  misc_feature 9: n = A,T,C or G
ctattgtanatattgcaccctatgacattggtggtcctgatcaagaatttggtgtggacgttggccctgtttgctttttataaaccaaactctatctgaaatcccaacaaaaaaaatttaactccatatgtgttcctcttgttctaatcttgtcaaccagtgcaagtgaccgacaaaattccagttatttatttccaaaatgtttggaaaacaagtataatttgacaaagaaaaaatgatctttctcttttttttggctggttccaccaaaataccaatttcaaaatggcttttttggtttaattttttttacccaatttccaattttcaaaaatggtcttcaatgggtggctattaataaaaataaaacctttcaaccacttcttttattggaataaacctta

SEQ ID NO: 905 - DNA, 327 bp, Homo sapiens
  misc_feature 189, 224, 259, 314: n = A,T,C or G
aagaaaggaaaataaactctttgtatgatatttattaggaggaaagaggactgaaaatgttcttgtgtagaaacagaaggacagcatttctgttagtcatttcctggaaaagtaatattttaaggggaaattatggaaacaatctaattgttcaattgctgtgctagtgggtagggtttattttctggnagtctctcctttgtgggctgtatgtttggtacacnccgtgccctctgcttgtcccaaagggaaggggttngtgtccaagtgtattggaagtagtggtggaacttaaagaacctggaaaaacggancttccccgggccg

SEQ ID NO: 906 - DNA, 508 bp, Homo sapiens
  misc_feature 339, 366, 409, 412, 442, 448, 466, 486, 500: n = A,T,C or G
gtcattgatgtccttcaccccgggaaggcgacagtgcctaagacagaaattcgggaaaaactagccaaaatgtacaagaccacaccggatgtcatctttgtatttggattcagaactcattttggtggtggcaagacaactggctttggcatgatttatgattccctggattatgcaaagaaaaatgaacccaaacatagacttgcaagacatggcctgtatgagaaagaaaaaaacctcaagaaagcaacgaaaggaaccccagaacagaatgaaagaaagtcagggggactgcaaaaggcaatgttggtgctggcaaaaaagaaatgaacctggaanattggatcaccagcccgaaaggaagtnaaaggtgcttcaatgatgttagcttgtggaccttccccgggcnggncgctcaaagggccaaattccaacacacttntggcgncggttacctaatggaatnccaaactcggtacccaaacnttggcgtaatcatngggccata

SEQ ID NO: 907 - DNA, 358 bp, Homo sapiens
  misc_feature 261: n = A,T,C or G
aaagttctttatagggttagggtgtgggaaaatgctatattaataaatctgtagtgttttgtgtttatatgttcagaaccagagtagactggattgaaagatggactgggtctaatttatcatgactgatagatctggttaagttgtgtagtaaagcattaggagggtcattcttgtcacaaaagtgccactaaaacagcctcaggagaataaatgacttgcttttctaaatctcaggtttgtctgggctctatcatatanacaggcttctgatagtttgcaactgtaagcagaaacctacatatagttaaaaatcctggtctttctttggtaaacagaattttacctccccggccgg

SEQ ID NO: 908 - DNA, 437 bp, Homo sapiens
  misc_feature 215, 218, 395, 405: n = A,T,C or G
ccacggggactgttattcgcaagctggttttctagacctgttagctggaagcatggtgagcaccatttctggacgctcaggccgtgtcgggcttcagtcatctccaccacacaggtacagcagcgctttctggtagtcgcccttagtgtcttgctggataaacaaggtcataaataacaaaaaacaaagtaggtcccagactccggaccatgcancangaacaggggtgggaagggttgttgaatgggaaaaggtggaagggggctacaccatcacctaaaaacagtcaccagaaaaagaatgggctttcaaggaacacttgcccctttccttgaccttcgggccgcgaaccaccgcttaaagggccgaatttccaaccacaccttggcgggccngttaattagnggaattcccaacttcggtacccaaactttggg

SEQ ID NO: 909 - DNA, 720 bp, Homo sapiens
  misc_feature 300, 341, 343, 348, 437, 467, 480, 483, 488, 515, 537, 540,553, 562, 573, 581, 601, 614, 644, 648, 663, 706, 709: n = A,T,C or G
gaaccaccacctccttacttacctgcctgaagaaattctgcctttgacaataaatcctataccagctttttgtctgtttatgttacagaatgctgcaattcagggctcttcaaacttgtttgatataaaatatgttgtcttttgtttaagcatttattttcaaacactaaggagctttttgacatctgttaaacgtctttttgtttttttgttaagtcttttacattttaataagtttttgaagacaatctaggttaagcaagaagcaaaagtgccattggttgcctttaattggggggngggaaagggaaaagaaggggtaccttgcccacataagtttncnttttnaactggccttttcttttatattaatccgttttggcattttggttaccttgctacccctgaagtacctttcaaggaaagaactggacttnaaatatttccggggggtgaagtaaagtaanttggggaattaanaancttgnaccttttcattctggcagaaggccaanaaaaaatattttggcaatttgngancttgactgggggnaaaaaaaangggtgcatggnttcctaanttgggataatgggttcccantttttgggaaaanaagaattaaataaaacttttttacctcggncccnaacacccctaagggngaaattccacacactttgggggcgttctaatggaaccaacttngtnccaacttgggg

SEQ ID NO: 910 - DNA, 459 bp, Homo sapiens
  misc_feature 311, 333, 353, 354, 368, 374, 375, 381, 386, 434, 435, 449,450: n = A,T,C or G
aaaaaaaatcaattccctcatcactgaaaggacttgtacatttttaaacttccagtctcctaaggcacagtatttaatcagaatgccaatattaccaccctgctgtagcaggaataagaggcaaggtattagcactaagaaaaacagcaaaattcctgaacaaaatcatctgtcattttaaaaaagggataaaaaaacaggctaagtgggtgagcattttagttaagaaaggcccagtgttgttatgcaggactttcccgttaaaaaaaaaaaaaatcgaaatattttaactcaagtacgtttaattcccncagaggagcttaaaaaaaaaanaggggggtagtaaaatccanntactttttttcctngggcgnnaccacnctaanggcgaattccacacacttggcggccgttactaatggatccaactcggnnccaacttggggaannatgggcata

SEQ ID NO: 911 - DNA, 216 bp, Homo sapiens
ggcaggtaaactacctcaaaacactttcccatgagtgtgatccacattgttaggtgctgacctagacagagatgaactgaggtccttgttttgttttgttcataatacaaaggtgctaattaatagtatttcagatacttgaagaatgttgatggtgctagaagaatttgagaagaaatactcctgtattgagttgtatcgtgtggtgtatttttt

SEQ ID NO: 912 - DNA, 92 bp, Homo sapiens
atcattttcaataaaagatagggcttttgctcccttgttcttggagggaccattattacatctctgaactacctttgtatccaacatgtttt

SEQ ID NO: 913 - DNA, 109 bp, Homo sapiens; identical to SEQ ID NO: 765

SEQ ID NO: 914 - DNA, 189 bp, Homo sapiens
ttctagtagaggacgagtctgaaagttgactgaaaaagcaaaagctaatttaattggttggtaacttgtaccaaaatattttacttcaaaatctataaagcaggtacagttaaggaataagtagaactaaggcttctgcttccttgctgcttggggtgggagtagggaaatgttatgatttgatttaca

SEQ ID NO: 915 - DNA, 244 bp, Homo sapiens
  misc_feature 1, 2: n = A,T,C or G
nnctgatcgtccttagccagtccaatctctacgaggaactggcatatgttcttgcgttggtcaccctgtagctgaattacttctccatattccggatgctcaattacaagtaccattgcaaggcaaactttttcttaaacgccttcactagtttctttttatcgtaatcatcagcgatcccttggacagtagtaaagggctttctgcccgttctctgtgaattcttacctcggcccgaacacgc

SEQ ID NO: 916 - DNA, 185 bp, Homo sapiens
ctatagggctcgagcggccgcccgggcaggtccaagcttgaggaagatgtgtggccttgcccccaattccatcagaccaaggctgcaagtggccctccattcgtgtgtgtatttaggggctggggagggggaaggggcaagaacttggaccttgtactacctcaagacctcgggccgcgaacacg

SEQ ID NO: 917 - DNA, 478 bp, Homo sapiens
  misc_feature 268, 363, 383, 398, 410, 418, 433, 455: n = A,T,C or G
aaataagagtagaataggcctttattttgccgcaaatacttttgattttgcctaaagtttctaatagttcataacaagagtctttaaatgagaagtgacatagaatatttgaggataatggtccactccagcattcatgcttattccatttgagctattacacaagaaactcataccattcttgggttattacttggctgtgacgatttaattcataatatggctgctcaaaattagtgggcagaaacatcatacacccattctcctnaacccatttttcgggctggtactccatctgaaaacacacttactggtcatgtcccaacagtacatatctctttctatctatttccatatcttaanccttgcttaaaaacctcggncgcgaacacccttanggcgaaattcancacactgngcggccggtcttagnggatcccaactcggtaccaacntggcgtaatatgggcatactggt

SEQ ID NO: 918 - DNA, 478 bp, Homo sapiens
  misc_feature 301, 329, 332, 341, 403, 415, 417, 423, 433, 436, 456, 460,476: n = A,T,C or G
ccagtcagggatgaggatggggcccgagggtctaaagaaggcactagagggacagggaccgctttgggtctcacccagtcaagttcacagtctgccctcttagtgtgaggaaatggggcttgaggtaccctgtttacttggcgctgggccaagccctccatctcctgagatggcctcatgtgggaagaaggcggaagggaaaggtcggctttgggaaatatcctatatgtcttgtcccgaaaggcttgtggcgggggcttccttgcttccaagggaatgcttggggaacgttgggcgggtncccttcttaaatgcttcaaaaaccttcnggnccggcgaanccaccgctttaaaggggccgaaatttccaaaccaccacttttggcggggccggttacctaantgggaattcccnanccttcnggtacccaangcntttgggcgtaaaattcattngggncaataaaccttgtttntt

SEQ ID NO: 919 - DNA, 357 bp, Homo sapiens
  misc_feature 31, 340, 342: n = A,T,C or G
aaaaaaattaaagtttccattttttttttanaataaagatttagtgcacaaatacagcccaaagccaacagaaaaattgctttgccctgtcatttccctaagaaagcactgaagttaactcaaaataggctgaaagaaaaaaagcaatcctctgagttctaggtttcacaaaaggaccacgtgttaaactatgtcatcgatttgatgtgcaagtatgcaataaatatgtacacatacattcctatctgcttttacatcattctaaagtattcatagtatatcaaagaagggatttagaaatgggaaaaggccataacagtgaaaaggaaaaaaaaagatncnatagtttttaaacca

SEQ ID NO: 920 - DNA, 581 bp, Homo sapiens
  misc_feature 277, 284, 349, 396, 420, 430, 462, 494, 542, 553, 569: n = A,T,C or G
aaactacctgttaatataagggatttgtagtatcagcttgttgagcaatgactttgaatctagttttcagtgatcagaagcagcagttatttgagtgtatgaatggaatgatgatcactgtgctataatgtactgaaaccaccatattacagaaatatttactacatattttccatctgtagtttctcagaagggctatggattaagtttgaactgtcaaatccttgcatacttctgtgacacccctgcccattttctgtctttaattaaccaaggnggtaggngtgactgtcacaactggtatgttttccagtaaactagaagtatgatatttgataattatatttgnatttcaccacctaaatgtaatggtgatttctcaagaatgaaatgaangcactacattgaaatatggtttgnataaatttgncatggtgaacaacattttaacatgggaaggtnccttactatatgaattttggcatggttcaaanaaacaataaataaaacctgccccggcggcgtccaaggcgaattccacnacttgcggcgntcaatggaccactcgnccacttgggaac

SEQ ID NO: 921 - DNA, 379 bp, Homo sapiens
  misc_feature 279, 294, 349, 363, 366, 371: n = A,T,C or G
tgggcaataaagtttttggtgccctgaagggagctgtggatggaggcttgtctatccctcacagtaccaaacgattccctggttatgattctgaaagcaaggaatttaatgcagaagtacatcggaagcacatcatgggccagaatgttgcagattacatgcgctcttaatgggaagaagatgaaagatgcttacaagaaacagttctctcaatacataaagaacagcgtaactccagacatggaggagatgtataagaaagctcatgctgctatccanaaaattcaatctatnaaaagaagccccagaaagaagttaaaaagaagaagtggaacccgtccaaaatgtnccttgcttaaaaanaangatcnggtagctt

SEQ ID NO: 922 - DNA, 542 bp, Homo sapiens
  misc_feature 126, 231, 250, 303, 332, 334, 355, 364, 366, 368, 391, 423,424, 439, 446, 461, 469, 473, 499: n = A,T,C or G
aaacatctcacatatacaaaataggtacaatttaatttttctgcttgcccaagaaacaaagcttctgtggaaccatggaagaagatgaaaatgagactgggcaaagaaacaaatgcttgaatctgnaagaaagaagggacaacttttgggcaaataatctgctacccttttaattgggaaataagaatgggaaaatatgaatgcttaatcaaattttttaaaaaatccccnccccgatccacttaatacnggaatatttcttctcaaattcttctaaccccatcaacattcttcaagtatttnaaatactattaattagcacctttgtattntnaaccaaacaaaacaagggccncagttcatntntntctaaggcagcacctaacaatgnggatcacactctgggaaagtggtttgaaggannttaaacctttggaantttgggntttcctgccccggcngccgttcnaaanggcgaattccacacactttgcggcgntcttatggatccactcggaccaacttgcgaatctgggatactg

SEQ ID NO: 923 - DNA, 483 bp, Homo sapiens
  misc_feature 176, 230, 241, 280, 282, 284, 291, 296, 297, 308, 328, 329,336, 353, 372, 373, 399, 406, 420, 423, 434, 436, 444, 456,457, 464, 474: n = A,T,C or G
aaatgcagggaaactcaatgtttttttaagttttgttttccctttaaagcctttttttaggccacattgacagtggtgggcggggagaagatagggaacactcatccctggcgtctatcccagtgtgtgtttaacattcacagcccaaaacccagatgtgtcttggaaaaccttgncaaggcattcctattcaccatcgtgtttgcaaaggttaaaacaaaaccaaaaanccccaaaattnaaaaccaaaaaaaccaaaaaccccagaaaaaaaaaaaantnancctttgnttttnntttcaaccccntcaaaaggggaacaacttcnnttgcctnggggttcccaaggaacntcttggttaacctggcccnnaaaaactgggttttgtcccaccattncaaaaantgggggggggtttnaangcttggggggntngctttgtnggaacctcggcnngaacccncctaaggggngaattccac

SEQ ID NO: 924 - DNA, 379 bp, Homo sapiens
  misc_feature 212, 229, 246, 251, 253, 269, 282, 299, 304, 320, 322, 325,335, 350: n = A,T,C or G
cctgagggagatcagttggcaacccaagtagaaggggcccatgctgctcttctggaacaagggtctgagcaggtgctgaaggaccccctcggtggagtttgaaatgtagctgagcccttgcccatatctggtgaaatactggaagaattggaagaatgggtgaaatttgaagtgtgaaggggtctttcaagggtgggtcccccatgggctgnttgtggctttttgacanaagaaggcaagaaatgntggtngnttgctttggaagttgnaagaagggttatnttgaccaggtcatttgnaaccngtaaaggaaaagcttncnttntccaaaaagnaggggccaaaacttncccggcggcccttcgaaaaggcgaattcc

SEQ ID NO: 925 - DNA, 511 bp, Homo sapiens
  misc_feature 270, 291, 294, 296, 324, 329, 395, 402, 424, 428, 442, 446,456, 482, 483, 495: n = A,T,C or G
gtggccgcaaagaagacgaaaaagtcgctggagtcgatcaactctaggctccaactcgttatgaaaagtgggaagtacgtcctggggtacaagcagactctgaagatgatcagacaaggcaaagcgaaaattggtcattctcgctacaactgcccagcttttaggaaatctgaaatagagtactatgctatgttggcttaaactggtgtccatcctacagtggcaattatattgaactgggcacagcatgcggaaaatactacaaaatgngcacactggctatcattgatncangngactctgacatcattagaagcatgccanaacanactggtgaaaagtaaaccttttcacctaccaaatttccctgcaaaccttaaacctgcaaaattttnctttatnaaatttgcttgtttacctgccnggcnggcgtcgaaaggcnattncacacacttngcggcgtacttatggatccagctcgnnccaacttggcgnaatatgggcatactgg

SEQ ID NO: 926 - DNA, 361 bp, Homo sapiens
  misc_feature 265, 281, 306, 318, 326, 333, 342, 354: n = A,T,C or G
ctgtggggctcggccccaaccccggccccaccccggcctggcgctgtctgagaagaggggatctgagggaagatccagggatcaggcaggatagggatggggcaggacatgaagcttgggggatgcagaaggttaggtgggaagaaggctacccggaaggaaagaaatgaaggcttggtagggggaggggaagaaaagaagaaccaaagaagaagaagaaggaagcaatttggggggccagaccttgcccgggccggccgcttcnaaaaggccaattccancacacttggccggccgttacttatngaatccaacttngtacccancttggcnaatcattgncatagctgtttncttggga

SEQ ID NO: 927 - DNA, 486 bp, Homo sapiens
  misc_feature 158, 310, 320, 331, 335, 357, 366, 369, 405, 410, 425, 436: n = A,T,C or G
aaactacctcaaaacactttcccatgagtgtgatccacattgttaggtgctgacctagacagagatgaactgaggtccttgttttgttttgttcataatacaaaggtgctaattaatagtatttcagatacttgaagaatgttgatggtgctagaaanaatttgagaaagaaaatactcctggattgagttgtatcgtggggggtatttttttaaaaaaatttgaattaacattcatatttttccattcttatttccaaattaaaagtattgccagaatattttggccaaaagttggtcctcttctttanaatcaagcanttggtctttgncaanctcattttcatcttctttcatnggtccacanaanctttgtttcttgggcaaagcagaaaaattaaattgnacctnttttggatatttganaaggttaaatnaattgggaaaaaaatgaaataaagcatggttgggttttccaaggaaaaaa

SEQ ID NO: 928 - DNA, 441 bp, Homo sapiens
  misc_feature 273, 305, 371, 391, 404, 414, 422, 428: n = A,T,C or G
cccagcttctcgagaggctgaggcaggagaatggtgtgaacctgggaggcggaacttgcagtgagccaagatcgcgccctgcactccagcctgggtgacaaagcaagactccgtctcaaaagaaaaaaaagaaaatatttgtaattaaatgaaaatgaaaacacagtatatcaaaatttgtggggatccagcttaatccagtggttttaaaaggaaacttcagcttttaaaagaaaaggtcttaaaatcaagtggaaccttaccatttcttgncctttattaagaaaaggaagaaaatcttaaantttggaaagaagaaaatttatttaaaggaagccttaaaaggttaaattggaagaattggaaaaaanccaaggggccccggggttgnaaagggtggggcnttcaaccttnccttggtnaaattncccccaaccaacc

SEQ ID NO: 929 - DNA, 480 bp, Homo sapiens
  misc_feature 15, 169, 180, 183, 190, 286, 302, 367, 377, 380, 399, 411,425, 428, 446, 447, 458, 461, 462, 471: n = A,T,C or G
cagggtttgggtacnattccgggtcatccgcagaaattcctcatagatggcaactcttgtctactctccgagccagtggcgagaagttacacagggagtccaccccggtgtggtgcctgttggggacagacctgaatgttgaaacttgacagtcagaaaaataactctngatgctgctgnttnggaaganttggttgagcccatcctcaatattccttttgttcctctggtaattggtggtgcctggctgggctttgtcctgggaatatggtaggttggtgatggngaaattcatgtaaaantgctgggtgctggaactgcttgttggttgataaactgatgactccatttctgcacatggatgccnccaactggtnggnggagcccaccaatgacctnggccgggacccnctaagggcgaattncanacactgggggccgtctannggatccaactnggnncaacttggngaatatggg

SEQ ID NO: 930 - DNA, 194 bp, Homo sapiens
aaaagggggtgggctagcttgaaacaagcttacagtggcgtgaagcatagtggcgtgaaagcaaggatacagaggcagcacaaaggcaattaattcatcaaattgtggcaggtgcataattcaggattacatactgtgtcggaattgatgggttcttggtctcactgacttcaagaaagaagcacctgcccggg

SEQ ID NO: 931 - DNA, 218 bp, Homo sapiens
  misc_feature 211: n = A,T,C or G
cgaggtccacagctccctcttgcgctgtatgacatcgtcctcaaaccactcggcctgattggaaacccagaacatagccacagggaaagtgagggaaaattatcatccgaatatctccagtttaccccatctacctgcccggcggccgtcgaaggcaattcacacacttgcggcgtctatgatcgactcgacaacttgctatatgctactnttctgga

SEQ ID NO: 932 - DNA, 107 bp, Homo sapiens
aaaaattagtctgtactcaaatgcatagttaaaaaatgaagcgagatggcagtttgtgcagtaatatctgcccttcgaagttcatgcaaccaactaatgcaattttt

SEQ ID NO: 933 - DNA, 340 bp, Homo sapiens
  misc_feature 235, 242, 259, 279, 297, 302, 310, 315, 324: n = A,T,C or G
ctgcagcccatcctcccggctccctcctagtctgtcctgcgtcctctgtccccgggtttcagagacaacttcccaaagcacaaagcagtttttccccctaggggtgggaggaagcaaaagactctgtacctattttgtatgtgtataataatttgagatgttttaattattttgattgctggaataaagcatgtggaaatgacccgaaaaaaaaaaccttccccgggcgggccgntcaaaangggcaaattccaacacncttggcggccggttactaangggatcccaactcggganccaantttggggnaaaanattgggcanaacttgtttcccctgg

SEQ ID NO: 934 - DNA, 148 bp, Homo sapiens
tatttgcccaaagttgtcctcttcttcagattcagcatttgttctttgccagtctcattttcatcttcttccatggttccacagaagctttgtttcttgggcaagcagaaaaattaaattgtacctattttgtatatgtgagatgttt

SEQ ID NO: 935 - DNA, 646 bp, Homo sapiens
  misc_feature 404, 480, 530, 531, 534, 580, 589, 594, 597, 602, 606, 609,615, 620, 621, 628, 633, 638: n = A,T,C or G
aaaaggcttcttgtgattaaaagagaaaattctgaaaaccacagcaacatatctatgctgtttccaagcatacaaagagaattagaacatctgagacaactatggctccaaacaatcagaagaagggttagttttcttttctcctattgataatgtcaaaatgatgtgtcatctattgagccatactatggagtagcaggctactagttagatgccttccccagttaacagcacatatccaaaggacagctagccaagtgggaaggtggtaggtaaatgctcatctgggctaggcaaccaccacagcaagcaggtcccctctcagcctggcttggcaatgagctgcttctgagaagccacagctatctgtggttgagagctcactcccttgaggcattgcaganaacaagagacatgggctgtggggcagcttttcaataaaactgagaggcacatcaacatggcacttgtatgtgtccncttaaggattatgataaacatgccaatttccaaaaggtaaattattaaannaanatttgggaccttgccccgggcgggcccgttaagggcgaaattccancacccttgngggcngtncttantggnatnccaacntcggnnccaaacnttggnggaancatgggca

SEQ ID NO: 936 - DNA, 152 bp, Homo sapiens
  misc_feature 27, 61, 95, 98, 142: n = A,T,C or G
ctgattttatttccttctcaaaaaagntatttacagaaggtatatatcaacaatctgacangcagtgaacttgacatgattagctggcatgattnttnctttttttcccccaaacattgtttttgtggccttgaattttaanacaaatattc

SEQ ID NO: 937 - DNA, 393 bp, Homo sapiens
aaaaaaactttatataacaatctgcataaatctcataactgggagcactatacccaggaggttttcttaccagaaaagttcatatcctctttgcaattttcttttaattctacaggaaagaggaaattatggttgggatggatgaaaaaggaccacatactggtccaggaggtaaagtatcttattttgccaactgtttgggcatctgtgtgcccattttttatttggaagatctaaattaattttgttgctcaaaaatcaacctttacaatcttacacatttacctctttcaagatagtgcctgagcctagagggaagatgcttatatagttttagcagtggagcattagcattgaaaatagatcgggcccagtgggattctgaatagtttt

SEQ ID NO: 938 - DNA, 439 bp, Homo sapiens
aaaacttggctgggattctcaacatatcttatcaataatacatgtatacaatccaaaaggtgcagtggcttcttcattctgttccagaatggatcccgtgatttgaacaactgatcataaacttctagtagtctaggtaatggtactccaatttcattcattgtctgtattacgaagcccacatcccagttcaaagtacaaacctgctgttctaaaaactgtacaataaaatctaaaggaaagaagcgtggtgtgccagcataaattttgccaaggagaacaatcttgagactaagagcatgcattctatccgaggagctcaatgtcacactgtcactcaattctttctctatgatatcttgccaaagtgtctgcaccaatatagggtctgaataacccggcacaatgaattattgcaagtttgcactcttgcaagttt

SEQ ID NO: 939 - DNA, 568 bp, Homo sapiens
  misc_feature 409, 467, 479, 483, 497, 514, 519, 537, 538, 556, 557: n = A,T,C or G
ctggaacagtatatgaagacctgaggtataagctctcgctagagttccccagtggctacccttacaatgcgcccacagtgaagttcctcacgccctgctatcaccccaacgtggacacccagggtaacatatgcctggacatcctgaaggaaaagtggtctgccctgtatgatgtcaggaccattctgctctacatccagagccttctaggagaacccaacattgatagtcccttgaacacacatgctgccgagctctggaaaaaccccacagcttttaagaagtacctgcaagaaacctactcaaagcaggtcaccagccaggagccctgacccaggctgccagcctgtccttgtgtcgtctttttaatttttcttagatggctgtcctttttgtgatttctggatanggactctttatcttgagctgggggatttttggtttggttttgctttttaccttgcccnggcggccgttcnaaangggcgaaattccancacacttgcgggcggtnactantggaatcccaacttcggnncccaaacttgggcgtaannattgggcataa

SEQ ID NO: 940 - DNA, 371 bp, Homo sapiens
  misc_feature 360: n = A,T,C or G
gcgaggagatcgccattatccccagcaaaaagctccgcaacaagatagcaggttatgtcacgcatctgatgaagcgaattcagagaggcccagtaagaggtatctccatcaagctgcaggaggaggagagagaaaggagagacaattatgttcctgaggtctcagccttggatcaggagattattgaagtagatcctgacactaaggaaatgctgaagcttttggacttcggcagtctgtccaaccttcaggtcactcagcctacagttgggatgaatttcaaaacgcctcggggacctgtttgaattttttctgtagtgctgtattattttcaataaatctgggacaacagcaaaaaanaaaaaaaaaaa

SEQ ID NO: 941 - DNA, 174 bp, Homo sapiens
aatggcggagctgggcgaagccgatgaagcggagttgcagcgcctggtggccgccgagcagcagaaggcgcagtttactgcacaggtgcatcacttcatggagttatgttgggataaatgtgtggagaagccagggaatcgcctagactctcgcactgaaaattgtctctccag

SEQ ID NO: 942 - DNA, 256 bp, Homo sapiens
ctttgtggacattggcccagtctgtttcaaataaatgaactcaatctaaattaaaaaagagagaaatttgaaaaaactttctctttgccatttcttcttcttcttttttaactgaaagctgaatccttccatttcttctgcacatctacttgcttaaattgtgggcaaaagagaaaaagaaggattgatcagagcattgtgcaatacagtttcattaactccttcccccgctcccccaaaaatttgaatttttttt

SEQ ID NO: 943 - DNA, 628 bp, Homo sapiens
  misc_feature 443, 507, 514, 549, 552, 553, 599: n = A,T,C or G
ctgtgtgtgcatagtaaagcaggagatccccgtcagtttatgcctcttttgcagttgcaaactgtggctggtgagtggcagtctaatactacagttaggggagatgccattcactctctgcaagaggagtattgaaaactggtggactgtcagctttatttagctcacctagtgttttcaagaaaattgagccaccgtctaagaaatcaagaggtttcacattaaaattagaatttctggcctctctcgatcggtcagaatgtgtggcaattctgatctgcattttcagaagaggacaatcaattgaaactaagtaggggtttcttcttttggcaagacttgtactctctcacctggcctgtttcatttatttgtattatctgcctggtccctgaggcgtctgggtctctcctctcccttgcaggtttgggtttgaagctgangaactacaaagtgatgatttcttttttatctttatgcctgcaattttacctagctccactaggnggatagnaaaattatcttatgttccctcaaaaaaaactcggncgnnaccccctaagggcgaatccaccccttgcggccgtatatggatccanctcggaccaacttgggaatatggcataac

SEQ ID NO: 944 - DNA, 516 bp, Homo sapiens
  misc_feature 444, 473, 494, 500: n = A,T,C or G
ccataatggtttgttgggggtgagggaaaaaacccacagggaccagaatgttttgttgttcttttgttttcttttttgtaccaaagtcaactgcacgtgttttatatttttaagagatcgtaggcaattagagatcgaagcctcctatctccacatctctgaagaagttgaggggtgggggagagaatgacttctgccttcatctgcagtaacggggggacctatactgacctcttccccagccatttagaaacaagttctagggtgggttggaaaatctccaagagccctgacctcatcttccacctcagcaaccatgacctgaaacctcagcgtgaatttgggggatttttcagtggaacccttgcccccaaatgtcgaccagcccccaaatgtcgaagaattttcttcttgccaattttgttggttacctgcccgggcggncgctcgaagggcgaattccagcacacttngcggccgtctagtggatccanctcgtnccaacttggcgtatct

SEQ ID NO: 945 - DNA, 345 bp, Homo sapiens
ctgctacttgaaccctaatccctgggtggatgtggtctcttgtaacttaagagcaaatgtttgtgatgacatgcacgggtgggcagaggttgaaaagaacaggggtctacggaggagccaggccagccacgtgagacccttctttctaagttggcttcttgtccattcctggggattggggaaagaacgacagaacttaccttccatcttccttctcacaagcagtgttttgggtgtccccaaaaggaggaggcaagaactcaggtgtggggtggaggggatggggctggctaaagaagtgagtatgaccccagaggccagagagggcagggagagaatgcctgg

SEQ ID NO: 946 - DNA, 553 bp, Homo sapiens
  misc_feature 498, 528: n = A,T,C or G
tggaaatgtaaagaaggccctgaagctgatggggtcaaatgaaggtgaattcaaggctgaaggaaatagcaaattcacctacacagttctggaggatggttgcacgaaacacactggggaatggagcaaaacagtctttgaatatcgaacacgcaaggctgtgagactacctattgtagatattgcaccctatgacattggtggtcctgatcaagaatttggtgtggacgttggccctgtttgctttttataaaccaaactctatctgaaatcccaacaaaaaaaatttaactccatatgtgttcctcttgttctaatcttgtcaaccagtgcaagtgaccgacaaaattccagttatttatttccaaaatgtttggaaacagtataatttgacaaagaaaaatgatacttctctttttttgctgttccccaaatacaattcaaatgctttttgttttatttttttacccaattccaatttcaaaaagtctcaatggngctataataaataacttcaacctctttatncaaaaaaaaaaaaaaaaaaaaaacc

SEQ ID NO: 947 - DNA, 635 bp, Homo sapiens
  misc_feature 494, 514, 526, 536, 545, 553, 555, 562, 591, 605, 623, 627,628: n = A,T,C or G
ctgggtaccattccgggtcatccgcagaaattcctcatagatggcaactctgtctactctccgagccagtggcgagaagttacacagggagtccaccccggtgtggtgcctgttggggacagacctgaatgttgaaacttgacagtcagaaaaataactcttgatgctgctgtttcggaagagttggttgagcgcatcctcaatattccttttgttcctctggtaattggtggtgcctggctgggctttgtcctgggaatatggtaggttggtgatggtgaaattcaggtagaagtgctgggtgctggagctgcttgttggttgataaactgatgactccatttctgtcacatggatgtccaccaactggtaggtggagcccaccaatggaatgaggcattcagggtcttatctagaaagacttgctccaccaggctggggtccaaattggaggagaacaatgccttgacagtgaccaacaccggagtccatcntcaatttggtgaccaggcanaaaccggaatgnggcattgtantttgactgnctttgtanantgggggngaacaccttcggccgcgaaccacccttanggggaaatttccanccccttggggggcggttnctanngggatcc

SEQ ID NO: 948 - DNA, 271 bp, Homo sapiens
gaagattcccgagagtaaatcatctttccaatccagaggaacaagcatgtctctctgccaagatccatctaaactggagtgatgttagcagacccagcttagagttcttctttctttcttaagccctttgctctggaggaagttctccagcttcagctcaactcacagcttctccaagcatcaccctgggagtttcctgagggttttctcataaatgagggctgcacattgcctgttctgcttcgaagtattcaataccgctcagtatttt

SEQ ID NO: 949 - DNA, 158 bp, Homo sapiens
ctgtggaggagggtttcagaggagagaggtcggagagcagaggcctgagaagccagaggcaggtggagagagggtggaaagtgagcagcgggctgggctggagccgcacacgctctcctcccatgttaaatagcacctttagaaaaattcacaagtcc

SEQ ID NO: 950 - DNA, 89 bp, Homo sapiens
ctgaacagagaaaggaattaaaacgctttaattaaaaaatcacgagtggatgataaagtgtgtagaaactgaaaatttacaaactattt

SEQ ID NO: 951 - DNA, 146 bp, Homo sapiens
ctgggggccctcaccctgcatcgtcttgcgtctcttggcaggcacaccactgaggtaggcatcactcagagggggctgcggtttcaccttccgctggctctgaatgtcctgctggataatagggacccattctggggggactgcag

SEQ ID NO: 952 - DNA, 223 bp, Homo sapiens
ctgatcgtccttagccagtccaatctctacgaggaactggcatatgttcttgcgttggtcaccctgtagctgaattacttctccatattccggatgctcaattacagtaccattgcaggcaaactttttcttaaacgccttcactagtttctttttatcgtaatcatcagcgatcccttggacagtagtaagggtcttcctgccgtttctctgttgaattctt

SEQ ID NO: 953 - DNA, 451 bp, Homo sapiens
  misc_feature 416: n = A,T,C or G
ctgaacagccaaatgcatggtgcagttgacagcaggtgggaaatggtatgagctgaggggggccgtgcccaggggcccacagggaaccctgcttgcactttgtaacatgtttacttttcagggcatcttagcttctattatagccacatccctttgaaacaagataactgagaatttaaaaataagaaaatacatgagaccataacagccaacaggtggcaggaccaggactatagcccaggtcctctgatacccagagcattacgtgagccaggtaatgagggactggaaccagggagaccgagcgctttctggaaaagaggagtttctaggtagagtttgaaggaggtgagggatgtgaattgcctgcagagagaaccttgttttgttggaaggtttggtgtgtggagatgcanaagtaaaagtgtgagcagtgaattcagcgagaggc

SEQ ID NO: 954 - DNA, 322 bp, Homo sapiens
aaattgcattcttttcaaatttataagtctaagaaaacaaaaccaaataaaagaagccatttcaaggagtgcgtatttgccatttgactgcaacaaaaggcccggccacactgagctaaaaggtaatactctcgaccccattcttctaacacagaaaactttctcaggtaaactgtggggttatgagaatccccctaactagaaatgttgatgggaactgagcattgcttgctttcatcaggtgttcttgttgccaaagacatgaacgatactgaggaaaacgacaagagtgagcattcccgccagtaaatcttcaagggtg

SEQ ID NO: 955 - DNA, 226 bp, Homo sapiens
ccactgcctctgcagtatcaaagagaattagtctttccacaaaacaaattttaacagccaatctctggatttctgtagtggctttagtcaggcatatttatcatcatattagcagtgttcagttcctgcccaacatctttatttaatcccaattcagtgcttatggatgctcagctcatgtttaatgttgcaagccccatcttagcccatcttaattcaaacagaa

SEQ ID NO: 956 - DNA, 232 bp, Homo sapiens
gatgatgtggctttgaagaactttgccaaatactttcttcaccaatctcatgaggagagggaacatgctgagaaactgatgaagctgcagaaccaacgaggtggccgaatcttccttcaggatatcaagaaactagactgtgatgactgggagagcgggctgaatgcaatggagtgtgcattacatttggaaaaaaatgtgaatcagtcactactggaactgcacaaactgg

SEQ ID NO: 957 - DNA, 247 bp, Homo sapiens
ggcccaggccgccacctgcaaccacactgtgatggccctaatggcttccctggatgcagagaaggcccaaggacaaaagaaagtggaggagcttgagggagagatcactacattaaaccataagcttcaggacgcgtctgcagaggtggagcgactgagaagagaaaaccaggtcttaagcgtgagaatcgcggacaagaagtactaccccagctcccaggactccagctccgctgcggcgccccag

SEQ ID NO: 958 - DNA, 400 bp, Homo sapiens
aaaacattgtcaggtgaggcaaatgcacaagtaatagaaagcaaagggcaaggttcactgaatcacagcagtcagaagaaagtgctttagggaaccaagagattgtttccagcctgaagaggcatgggtggcaaatcagaaaaggggattgagattaaaatagaagacttcagtctggattgttgatgacactcagtatggactatatttgtctctccttttcctttctccccatctttgggcttaatttacatgtagtgcccaggactgttcaatgcgctttttctatacttgcttgcatttttgctttaatgtcttctacagaactaggtccttttggtgttttaggagttttttcctgtttcttgaaggattcttgtcctttacctcgccgcgacca

SEQ ID NO: 959 - DNA, 632 bp, Homo sapiens
  misc_feature 523, 550, 556, 582, 610, 617, 620: n = A,T,C or G
gagcgccgctccggctgcaccgcgctcgctccgagtttcaggctcgtgctaagctagcgccgtcgtcgtctcccttcagtcgccatcatgattatctaccgggacctcatcagccacgatgagatgttctccgacatctacaagatccgggagatcgcggacgggttgtgcctggaggtggaggggaagatggtcagtaggacagaaggtaacattgatgactcgctcattggtggaaatgcctccgctgaaggccccgagggcgaaggtaccgaaagcacagtaatcactggtgtcgatattgtcatgaaccatcacctgcaggaaacaagtttcacaaaagaagcctacaagaagtacatcaaagattacatgaaatcaatcaaagggaaacttgaagaacagagaccagaaagagtaaaacctttttatgacaggggctgcagaacaaatcaagcacatccttgctaatttcaaaaactaccagttctttatttggtgaaaaacatgaatccagatgggnttggttgctctattggactaccctgangatggngtgaccccatatattaatttctttanggatggtttaaaaatgggaaaatgttancaaatgnggnaattattttggg

SEQ ID NO: 960 - DNA, 206 bp, Homo sapiens
cgctcagaccctgtcttccctaccactgggtacagatggatgcggcgaagtcaagagaaccaatggcagaaggaggagtgtagagcttacatgcagatgctgaggaagttgttcacagcaatccgtgccctgttcctggctgtctgtgtcttgaaggtcattgtgtccttggtttccttgggagtaggtcttcgaaacttgtgtgg

SEQ ID NO: 961 - DNA, 204 bp, Homo sapiens
ctgccaaggagaccctgttatgctgtggggactggctggggcatggcaggcggctctggcttcccacccttctgttctgagatgggggtggtgggcagtatctcatctttgggttccacaatgctcacgtggtcaggcaggggcttcttagggccaatcttaccagttgggtcccagggcagcatgatcttcaccttgatgccc

SEQ ID NO: 962 - DNA, 190 bp, Homo sapiens; identical to SEQ ID NO: 636

SEQ ID NO: 963 - DNA, 495 bp, Homo sapiens
  misc_feature 387, 452, 458, 473: n = A,T,C or G
aaagttaactggataactaaagaaatgatgcagacattttaatccagtgctataggtaggctcacagaattagacccaaaggatttgtaaaaacaaaaatggaaacagtatagctacaatgtcaaagtcaggaaagaagaaaatttacttccgtattcaaggattacagagctacaaatgcagtctgtgtgtttttgtttgtaatgagatggataagtacatcagactagatacaacatgcagaatgttttcctgaacttatccggaaattccaaagaaaacatcatgaaacagcttacaaaaaaaaaaatatatgccctagttattcaccctgcttcaacactgtcaacgtaaaggcagaaataaagcaagctatcaatacctcanaactactgatataagacatcaaatttctaaatcagtgtattaaaaaagtgaacacttcctctttntttttnttctacattaactanaacatgttacctcggccgcacc

SEQ ID NO: 964 - DNA, 472 bp, Homo sapiens
  misc_feature 355, 363, 378, 394, 409, 412, 429, 447, 451, 454: n = A,T,C or G
ctgggtgacaaagtgctcacagttcctgctcacaatactgtacttcatcttctgaccaaccatctccttcgcagaactgatgatcacctccacgggccgtggttggtactcatggtccaagctgttgttgacccgatagcaacagcctcccaccacatcttccaggcgctcccgtttcacctctgcactgttgctcaggactgagaagacactggaggagccagccccggggtactcacttggaggagccagatggatcacgtagccatctcctatatacagggcccagtgctcatagccaaggcggaaaatctcaatcaggtctccaggtttgggctcttggtgtgggcgaaanccatctcnaaacccaaaccttgnccgggcgggcggttcnaaaagggcgaaattncancacacttggcgggccgntacttaattgggatcccnagcnttnggtaccaacctttgggcg

SEQ ID NO: 965 - DNA, 622 bp, Homo sapiens
  misc_feature 435, 466, 486, 512, 529, 536, 555, 573, 584, 589, 600, 606: n = A,T,C or G
ctgggtaccattccgggtcatccgcagaaattcctcatagatggcaactctgtctactctccgagccagtggcgagaagttacacagggagtccaccccggtgtggtgcctgttggggacagacctgaatgttgaaacttgacagtcagaaaaataactcttgatgctgctgtttcggaagagttggttgagcgcatcctcaatattccttttgttcctctggtaattggtggtgcctggctgggctttgtcctgggaatatggtaggttggtgatggtgaaattcaggtagaagtgctgggtgctggagctgcttgttggttgataaactgatgactccatttctgtcacatggatgtccaccaactggtaggtggagcccagccaatggaatgaggcattcagggtcttatctagaaagacttgctccaccangcttggggtccaaattggaggagaacaatgncttgacaagtgaccaacacngagtccatcgtcaagttggtgaccangcagaagcggaatgggnatggagntgactgccttttagaatgngggaccttgcctggatgncctcacagggngatgnctttgaagatngggggntgaatactgaggtcca

SEQ ID NO: 966 - DNA, 255 bp, Homo sapiens
  misc_feature 8, 13, 14, 27, 37, 39, 54, 56, 69, 73, 87, 88, 103, 104,105, 172, 174, 190, 191, 192, 201, 222, 229, 246, 250: n = A,T,C or G
tggtcacnctaannaccacaggtgttncacctgtgananagggtcatatgcaantntgctgatgaatantgancaattattgaaccnntaacattttattgcnnnctgggtggaatctcacaattagagattatttccccttttcttggatatggcattgctggtggtgcancnatggagagggtttcannncccactggntcaaaagtgagggggcaaaangaacctnaatgtgtgtgtgtgtgngtgngtctg

SEQ ID NO: 967 - DNA, 337 bp, Homo sapiens
ctgagctgaggaaggtgaccactgagaacccattcaacctgctgagcaggctgggcagaaaggagcaggacttgggacagacgactgaagatgcagagaccccatgggccccacccctgggccttcctcccatgtggctgcaggccatcctctctgatcactgctgggttgcttcctggttaaagggccagaaggtgaaggagatgggcttttcaggcatcagaatgaggttgaatgtggtgcccacatcgctgaggtgttggatttcaactctgaagttctccagcatattgatgaggaagatggtcatctctagctcagcgatccgccgtcccag

SEQ ID NO: 968 - DNA, 285 bp, Homo sapiens
  misc_feature 11: n = A,T,C or G
ctgaaagattnactgcctgaacatctgaaattgacaactctgggacatctggagaaagctgtagtcttggaattaactttgaaacacttaaaagctttaaccgccttaaccgagcaacagcatcagaagataattgctttacagaatggggagcgatctctgaaatcgcccattcagtccgacttggatgcgttccactcgggatttcaaacatgcgccaaagaagtcttgcaatacctctcccggtttgagagctggacacccagggagccgcggtgtgtccag

SEQ ID NO: 969 - DNA, 520 bp, Homo sapiens
  misc_feature 418, 421, 441, 464, 481, 487, 499, 510, 512, 517: n = A,T,C or G
atggcttttaaggataccggaaaaacacccgtggagccggaggtggcaattcaccgaattcgaatcaccctaacaagccgcaacgtaaaatccttggaaaaggtgtgtgctgacttgataagaggcgcaaaagaaaagaatctcaaagtgaaaggaccagttcgaatgcctaccaagactttgagaatcactacaagaaaaactccttgtggtgaaggttctaagacgtgggatcgtttccagatgagaattcacaagcgactcattgacttgcacagtccttctgagattgttaagcagattacttccatcagtattgagctaggagttgaggtggaagtcaccattgcagatgcttaagtcaactattttaataaattgatgaccagttgttaaaaaaaaaaaaaaaaaaaacttnccnggggggccgttcaaaggggnaatttccccccacttgggggccntttttagggaatccganctgggnccaaccttgggnaaataatggcnanactgnttc

SEQ ID NO: 970 - DNA, 162 bp, Homo sapiens
aaatttttcattttattcaaagttggtacagaattgctaacatttccataaaataattactatacttcagttacaggacaaaataccacagaaaggaatgtactttgcaagaaatgtagttcatcttaagtttccaaatacttttgaaggctaatgcagcag

SEQ ID NO: 971 - DNA, 254 bp, Homo sapiens
aaaaagtattctagcacaagatttttctgtaaactagattatgttgtaaacttttttctaaatcttgtaggagtgtcggttgttaagaactagagcttattcctattccaaatctatcttgcgctcctgaaaagctgcagaaaggcacttgaaagctgtttctttaagatatggatttcttttttattcttgctggtaatatattgctgcactgagtgtgtgcaatttttattcaaggtcatcgtgatgctgag

SEQ ID NO: 972 - DNA, 297 bp, Homo sapiens
  misc_feature 290, 291: n = A,T,C or G
tggcagcctcagctctgtgcccctcaccctgctccctctcgccccttctctcccaccccttccttctgagccgggccctggggattggggagccctcttgttcctgatgagggtcagggcagatgaaagtgttgaaaagaggtcaaatggaaacaaaggctcttacccgctgtatttcagacaggactgaggcacttagccgaggagccactgggttattagattaatttcaaaagagcttttacaagttgcttaattccttttttttttttttttttttaaaaaccccnnaacccc

SEQ ID NO: 973 - DNA, 270 bp, Homo sapiens
agctgatccagaaggagctcaccattggctcgaagctgcaggatgctgaaattgcaaggctgatggaagacttggaccggaacaaggaccaggaggtgaacttccaggagtatgtcaccttcctgggggccttggctttgatctacaatgaagccctcaagggctgaaaataaatagggaagatggagacaccctctgggggtcctctctgagtcaaatccagtggtgggtaattgtacaataaattttttttggtcaaattcaaaaaaa

SEQ ID NO: 974 - DNA, 712 bp, Homo sapiens
  misc_feature 383, 494, 521, 529, 530, 566, 591, 651, 667, 679, 680, 688,699, 711, 712: n = A,T,C or G
aaactcacataggtaggtatctttatagttgtagactatggaatgtcagtgttcagccaaacagtatgatggaacagtgaaagtcaattcagtgatggcaacactgaaggaacagttaccctgctttgcctcgaaaatgtcatcaatttgtaattttagtattaactctgtaaaagtgtctgtaggtacgttttatattatataaggacagaccaaaaatcaacctatcaaagcttcaaaaactttgggaaagggtgggattaagtacaagcacatttggcttacagtaaatgaactgatttttattaactgcttttgcccatataaaatgctgatatttactggaaacctagccagcttcacgattatgactaaagtaccanattataatgccagaatataatgtgcaggcaatcgtgggatgtctctgacaaagtgtgtctcaaaaaataatatacttttacattaaagaaaatttaatggttctctggagntggggctcttggctttcagagtttggntaatcaanngttgattctagatgataaccttaaatggaccactcntgaatgagacttaattttggctttnaaaattactggcttaaatcagtttattaaatctgaatttaccttgcccgggggcccttcnaaggggaattcccccncttgcggccgtnnaatggatnccactcggccnaacttgggggtnn

SEQ ID NO: 975 - DNA, 266 bp, Homo sapiens
aaatttgaccaaaaaaaatttattgtacaattacccaccactggatttgactcagagaggacccccagagggtgtctccatcttccctatttattttcagcccttgagggcttcattgtagatcaaagccaaggcccccaggaaggtgacatactcctggaagttcacctcctggtccttgttccggtccaagtcttccatcagccttgcaatttcagcatcctgcagcttcgagccaatggtgagctccttctggatcagctcct

SEQ ID NO: 976 - DNA, 627 bp, Homo sapiens
  misc_feature 322, 452, 484, 488, 530, 535, 539, 576, 578, 590, 593, 605: n = A,T,C or G
aaaattaaaattaaatcccctccctccagcacacacaaaaaaaacacacaacattagaggaatgccaaaaatattctctattacaacttttttaaattctttaattaaggcattggtcccaacggtgcacatagattaagggattttgcttccttctgaactagatcatttgttagaggcttcagaaaaagaaaattagcttgaaatctagtctgggaaattgggggcagggaatgaaaaagttggtctcttgtttctccacgatacacaggcttcccatctaaagtcatgcttaactaaaagggaaaaaaaatgaaccaancaaaagtatatagagtagccgtgacatttgcattattttctagactttacatttgcctgcaacaggcataacatgaaactccagagggaatttggattgatagggaatgttcacataaacacccaccagnggctaactgttacacaacatttcaagtattcnaaanaactgcctggagacaaaaagcgaagggtccccagacccattnccccntccngttaggtcatgcaccaggatggtcccttcccaggtcnantggaaatcaaangcntgaaatggatcnggggcaggggaaacctcggccc

SEQ ID NO: 977 - DNA, 390 bp, Homo sapiens
ctgggtaccattccgggtcatccgcagaaattcctcatagatggcaactctgtctactctccgagccagtggcgagaagttacacagggagtccaccccggtgtggtgcctgttggggacagacctgaatgttgaaacttgacagtcagaaaaataactcttgatgctgctgtttcggaagagttggttgagcgcatcctcaatattccttttgttcctctggtaattggtggtgcctggctgggctttgtcctgggaatatggtaggttggtgatggtgaaattcaggtagaagtgctgggtgctggagctgcttgttggttgataaactgatgactccatttctgtcacatggatgtccaccaactggtaggtggagcccagccaatg

SEQ ID NO: 978 - DNA, 375 bp, Homo sapiens; identical to SEQ ID NO: 820

SEQ ID NO: 979 - DNA, 467 bp, Homo sapiens
  misc_feature 451: n = A,T,C or G
cgcggctgcagggtccggtcttcggtttgcacagctagaggccgcgcagcagcaaaggatgagcggaaccttggaaaaggtgctgtgcctgaggaacaataccatttttaagcaagccttttctctcttaaggtttagaacttcaggagagaagcccatctattctgtagagagagacggtcttgcttgtggcccaggcttgagtacagtggcatgatcatagctccctgcagcctcgaactcctgggttcaagcaatcctcctgcctcagcctctggagtagctgggattacaggtggaattctactaagtatcagtcggccctacaagacaaagcccacccacggcattggaaagtacaagcacttaattaaagcagaagacccaagaagaagaagggaaaagtggaagtgagagccattaatttggggacagattatgaatatggggntttacctgccgggcgg

SEQ ID NO: 980 - DNA, 218 bp, Homo sapiens
  misc_feature 1, 2: n = A,T,C or G
nnacgagaagtcctgcaactgcctcctgctcaaagtcaaccagattggctccgtgaccgagtctcttcaggcgtgcaagctggcccaggccaatggttggggcgtcatggtgtctcatcgttcgggggagactgaagataccttcatcgctgacctggttgtggggctgtgcactgggcagatcaagactggtgccccttgccgatctgagcgcttgg

SEQ ID NO: 981 - DNA, 660 bp, Homo sapiens
  misc_feature 461, 466, 509, 513, 551, 552, 568, 570, 585, 589, 597, 600,601, 629: n = A,T,C or G
ccaactatgcctctcagaacatcacctaccactgcaagaacagcattgcatacatggatgaggagactggcaacctgaaaaaggctgtcattctacagggctctaatgatgttgaacttgttgctgagggcaacagcaggttcacttacactgttcttgtagatggctgctctaaaaagacaaatgaatggggaaagacaatcattgaatacaaaacaaataagccatcacgcctgcccttccttgatattgcacctttggacatcggtggtgctgaccaggaattctttgtggacattggcccagtctgtttcaaataaatgaactcaatctaaattaaaaaagaaagaaatttgaaaaaactttctctttgccatttcttcttcttcttttttaactgaaagcttgaatccttccatttcttctgcacatctacttgcttaaaattgggggcaaaaganaaaangaaggattgatcagagcattgggcaatacagtttcattaactncttnccccgttcccccaaaatttgaatttttttcacattttnncctgtatggaaaatgnanctttgtagaaacccnattnaaattganaannaaccttaactttcccctgtggtttgaantttccccaaggaattactccccgcggcaagg

SEQ ID NO: 982 - DNA, 580 bp, Homo sapiens
  misc_feature 520, 554, 562, 563, 571, 572: n = A,T,C or G
aaaccaatcttccaggagattaatcaatgaaatttataagttttatcaacgtataaaatttttttcatcttctgggactcatagaatacaatctgtgtttctgaccagttgaggtagttaaaatagggagggcttttctaatttcgtatttgactatttcagaaagaaaggttatcttttactggtgagcacagtcattgctctgcagatgggctaggattcaaagaatataacacagtgttgttatcataaagagtgttgaagtttatttattatagcaccattgagacattttgaaattggaattggtaaaaaaataaaacaaaaagcatttgaattgtatttggtggaacagcaaaaaaagagaagtatcatttttctttgtcaaattatactgtttccaaacattttggaaataaataactggaattttgtcggcacttgcactggttgacagattagaacagaggaaccattggagtaaatttttcctgcccggcggcgctcagggcgaattccncacctggcggccgtctgtggtccactcggaccanctgggganntgggctanngttccgga

SEQ ID NO: 983 - DNA, 271 bp, Homo sapiens
  misc_feature 171, 237, 243, 248, 259: n = A,T,C or G
ccagtgccccccaggaggctccaccctcaactcaacccaagcaacagggacagatgaaaaacaaaatccaatcagggcgataaatagcggggggcaggacgtggtggtctccaggctggcttcgtgcgttcttgcttttgtcactgcccccctgttacatggggggggggnttaatttggtttctgagcgcataaagctaaggaggggtaaaaaaaaacaaaaaaaaaaaaaagggnaaattnccccnaaaaaaaaaangggggaaaaaaa

SEQ ID NO: 984 - DNA, 336 bp, Homo sapiens
ctgccaagctcaagtccagtggaatttatcaacaatttatcaccctgcccctgctctgctagacaatttcatgccttctcctttatccccatgctcctgagactgagcctttccaggagcccctcaacctgcttcctcccagaatccgggcaaggctacactggtttcccctctgcagggccctggccctgggagggggaaggctgactctaatggggaggaatcccagcttcagtggcttcaaggcaggccattcaacttaccgaccttggctacacacacccacgacacgcaacacagacgcagacacaagactggcacttgggatcacactgg

SEQ ID NO: 985 - DNA, 209 bp, Homo sapiens
  misc_feature 45, 48, 49, 58, 64, 70, 77, 83, 86, 97, 113, 157, 159, 166,187, 191: n = A,T,C or G
aaacatctcacatatacaaaataggtacaatttaatttttcttgnttnncccaaaaancaaagnttttgnggacccntggaanaanatgaaaatganactggcaaagaacaantgctgaatctgaagaagaggacaactttgggcaaataatctgcntncttttanttgggaataagatggaaaatntgantgctaaatcaaatttttt

SEQ ID NO: 986 - DNA, 236 bp, Homo sapiens
  misc_feature 8: n = A,T,C or G
aaaaatgngaaatgtctccacttagcgtagatcaatcaagtcagccatctcctaagaaatacacattatacaatgaaatctacaaagacacactttttaacttcaagcgttgttgattttcagcaaccctcttcccacatgaacatttccttgtaatgtaatgtatgacttttaatcttcttttggcagagtagggactttgagaattataatagcagttgttttgaaaagcacct

SEQ ID NO: 987 - DNA, 260 bp, Homo sapiens
gggaacgtcatcgtttggaaagcgtcgcaataagacgcacacgttgtgccgccgctgtggctctaaggcctaccaccttcagaagtcgacctgtggcaaatgtggctaccctgccaagcgcaagagaaagtataactggagtgccaaggctaaaagacgaaataccaccggaactggtcgaatgaggcacctaaaaattgtataccgcagattcaggcatggattccgtggaggaacaacacctaaacccaagagggcag

SEQ ID NO: 988 - DNA, 167 bp, Homo sapiens
aaacaaactatagaactcttcattgtcagcaaagcaaagagtcactgcatcaatgaaagttcaagaacctcctgtacttaaacacgattcgcaacgttctgttattttttttgtatgtttagaatgctgaaatgtttttgaagttaaataaacagtattacattttt

SEQ ID NO: 989 - DNA, 320 bp, Homo sapiens
  misc_feature 188, 238, 260, 278, 304: n = A,T,C or G
aaataaaaagtaaaagcacacagtgtataaaaaataataaaagccatcttaatattgcttacatcctaatactattagttatattcggggcaagcagactaggatattggtgttacttctataaagttaccttctgtttctaaatgctgtaaactaaactaaaacaggttacccagaaaaaagtggcnaattccaaaatggcttaatacctgtgacaactattgacttgagccaggtncaacatcgatgaaattcacacntacaatgtaaagttgaantaatccccaaattattttacattatntatgtatactttacaa

SEQ ID NO: 990 - DNA, 451 bp, Homo sapiens
  misc_feature 364, 374, 378, 382, 395, 410, 418, 437, 442: n = A,T,C or G
aaagctaaataagcgacaagtgataaactgacatattctattaaccccagcatgaggatacctcttctgcaatgatgtggcaaattatttattaaagcaaggtaaactttagcctcagatatagataactctcactcagaggaaagaaagaattttttgatcataggaaaaattggcttgtgccttttccccttcaaagaacatttataaaaaccttataacttcagtgaaatacacaaaatgacttatgctgacctggacttttttccccttttgaaaaatcgactaaaatatatatctttcaatttcccccttgaatatgaaaaacctgactaaaagaaaaagatgtttcctatgaaggtgncctctttgtnatanccantaggattttccanaaaatatttgattanaacccaanggtaggagaaaccttttcnttaancttcaatta

SEQ ID NO: 991 - DNA, 151 bp, Homo sapiens
gcatgaaacccctgtcacatatcccctagattgctcaatcaatcacgaccctttcatgtgaaatctttagtgttgtgagcccttaaaagggacagaaattgtgcacttgaggagctcagattttaaggctgtagcttgccgatgctcccag

SEQ ID NO: 992 - DNA, 211 bp, Homo sapiens
  misc_feature 177, 186, 189, 191, 202, 205: n = A,T,C or G
aaaagccaaaaaatgggagacaatttcacatggactttggaaaatatttttttcctttgcattcatctctcaaacttagtttttatctttgaccaaccgaacatgaccaaaaaccaaaagtgcattcaaccttaccaaaaaaaaaaaaaaaaaaaattaattaatttcttttttccntcccggggnggncnttcaaaggggnaantcccac

SEQ ID NO: 993 - DNA, 59 bp, Homo sapiens
  misc_feature 6, 9, 10, 19, 25, 54: n = A,T,C or G
ctgatncanncttaccaanggatgncagagccatgccatggtgaggggcttgcnaatgg

SEQ ID NO: 994 - DNA, 193 bp, Homo sapiens
  misc_feature 133: n = A,T,C or G
gaagcctgttttgttggaaggtttggtgtgtggagatgcagaggtaaaagtgtgagcagtgagttacagcgagaggcagagaaagaagagacaggagggcaagggccatgctgaagggaccttgaagggtaangaagtttgatattaaaggagttaagagtagcaagttctagagaagaggctggtgctgtgg

SEQ ID NO: 995 - DNA, 539 bp, Homo sapiens
  misc_feature 288, 318, 324, 334, 399, 402, 422, 428, 430, 444, 450, 452,456, 463, 471, 483, 504, 517: n = A,T,C or G
ccagtgtgtataaccccttccactatctcacagatagtcacagcgtccattccatagtctgtctcctcacatctgttagtattgacacagcacagacaccacaagccatcaggttcttcatggggcaggtgaaatacttctaccccatgggtaaatgtatttacatattaccaagagaagaagcacattatctatgatcttttggcccagttcttatttagcatttttattccagcctacttggaaacatgtttttatttgcaatatatgcctgactgaattaagctngcttggtttaaacaaccaaatcattggaangaaaanggatttaaanaacaagaatgcttgatctcagcggtgattaaaaaaaaatcaggggaaataaatgatcataagaanggngctttcaaacaactgctatnataatntnaaaggcctctttgncaaaanangatnaaaggcntcctttcnttccagggaaangttttgtgggaaaaagggttnttaaaacgaccanccttgaggttaaaaagggggcc

SEQ ID NO: 996 - DNA, 442 bp, Homo sapiens
  misc_feature 415, 421: n = A,T,C or G
ctgaggtctcttgagggagcttagccaatgtgggagcagcggtttggggagcagagacactaacgacttcagggcagggctctgatattccatgaatgtatcaggaaatatatatgtgtgtgtatgtttgcacacttgtgtgtgggctgtgagtgcaagtgtgagtaagagctggtgtctgattgttaagtctaaatatttccttaaactgtgtggactgtgatgccacacagagtggtctttctggagaggttataggtcactcctggggcctcttgggtcccccacgtgacagtgcctgggaatgtattattctgcagcatgacctgtgaccagcacttgtctcagtttcactttcacatagatgtccctttcttggactcggccgcgaccacgcttaaggcgaatttccacncccttngcggccgtactatggaatcca

SEQ ID NO: 997 - DNA, 498 bp, Homo sapiens
  misc_feature 331, 407, 412, 428, 457, 484: n = A,T,C or G
ttttttttagtgaaaataagctttattacatcaagtaataaatacatacaaagatgcaaacagttttagtcattttcttccagatgtttttatcaacttacaataaacgcagaactgagatctacttacagtcttagtatgaaagtgttcgggggtccttgttaggtttggtgggttgctctttcttctgtatttataacttgtgcatttttaaaaattgactttgaagcactaatagtcatgcaaatgcttaagcaaaaaagaagttacattaagcagaacctacattgtatggcaaatgggaaccggctactaagtaaagcgtgctgtnaatatgcgttcaaaacaaaatccctacagtgggtattagcttatgaaaagggaacaaagaacaccatgggtaacanatgtntacaaaagagaagaanaatggggagaccatggtgtcttggagggnaaactacaacctgcccgggcggccgtngaaggcgaaattca

SEQ ID NO: 998 - DNA, 453 bp, Homo sapiens
  misc_feature 226, 227, 361, 376, 385, 399, 413, 417, 428, 439, 443, 450: n = A,T,C or G
cagatgcggaagacctcttatgctcagcaccaacaggtccgccaaatccggaagaagatgatggaaatcatgacccgagaggtgcagacaaatgacttgaaagaagtggtcaataaattgattccagacagcattggaaaagacatagaaaaggcttgccaatctatttatcctctccatgatgtcttcgttagaaaagtaaaaatgctgaagaagcccaagtttnnattgggaaagctcatggagcttcatggtgaaggcagtagttctggaaaagccactgggggacgagacaggtgctaaagttgaacgagcttgatgggatatgaaccaccagtcccaagaatctgtttacctgccnggcggccctcgaaanggcgaattncacacactgggcgncgttactagtgggntccnagttcggtccnaagcttggcgnaatnatgggcntta

SEQ ID NO: 999 - DNA, 581 bp, Homo sapiens
  misc_feature 491, 502, 527, 540, 555, 562, 563, 568, 579: n = A,T,C or G
acaaaaaaattcttttatgtacaatatcttgtctagagtctagcaaatatagtacctttcattgcaggatttctgcttaatataacaagcaaaaacaaacaactgaaaaaatataaaccaaagcaaaccaaaccccccgctcaactacaaatgtcaatattgaatgaagcattaaaagacaaacataaagtaacttcagcttttatctagcaatgcagaatgaatactaaaattagtggcaaaaaaacaaacaacaaacaacaaacaaaacaaaacaaacaaacaaaaaatcccaccaatcttcatgggtaaactttcctgctcagggatgtaagctgactctagaccatctcgcggttcctgcggatagcacagcacaagatcatactgaagatcatgccaaatatcatgaccacggcaatgccgatgcccactgcgccgatgatgtggaatttattggtcgaagacctcttttgatggcatcaggacangacttcacggngaaggtttcgagtcctccttccctncccggccggccgnttaaggcgaattcanccccctnncggcnttcctatggancc

SEQ ID NO: 1000 - DNA, 299 bp, Homo sapiens
gttccaggtgtatcttagctaaaactagagaatgccctaacttagatggtttttgaagcctatacaattggtattgtttgacccttaagcttttacatctcttagcatggaggacgaagaaagctgtacattgttgcttgagagtctgtacatttagtccagatttgtatttgcactgccagtatggcaaatgagtgaaaaatgtttaatacactattggattttttatttcctttttttgattcagcttatacccgggctgaaaacctcaatttatgttcatgacagtggggattttt

SEQ ID NO: 1001 - DNA, 333 bp, Homo sapiens
ttttttttgaattttaatatgatattttattatgggtgtctgtaaggaaaaaaaagatcaacaaccacatacaagcttacaaagttaaatttcaacacattctctatgctagtgtgacaaaagcagccccataatttggtttttattgttgacctttacaggatgaaggaggagaatcccctgtggcatgccaatgaatctttctgatgggagacatgtacagattttgtgcatttatgttctgaatgcaagtcaacaattctgatctagagtttaaaagtgaaagtacattagcaccataacatgcgtctttaaagccttcccaaatattaa

SEQ ID NO: 1002 - DNA, 367 bp, Homo sapiens
gcagaacaaatcaagcacatccttgctaatttcaaaaactaccagttctttattggtgaaaacatgaatccagatggcatggttgctctattggactaccgtgaggatggtgtgaccccatacatgattttctttaaggatggtttagaaatggaaaaatgttaacaaatgtggcaattattttggatctatcacctgtcatcataactggcttctgcttgtcatccacacaacaccaggacttaagacaaatgggactgatgtcatcttgagctcttcatttattttgactgtgatttatttggagtggaggcattgtttttaagaaaaacatgtcatgtaggttgtctaaaaataaaatgcattt

SEQ ID NO: 1003 - DNA, 388 bp, Homo sapiens
aaaaaaagtggggagagggtgagagtcgtaaggggcaatagcaatagagattacactgtgctgacacagagactaaattctagtcagagtgaagacccatataaaaggccggctgatggtttaaaggaagtaaccacatggagtctaatcgagacattcatgagttacatctcattattagccttagtaatgtaagaaaacaattctcaacaaaactggagtccacagttgtcaagtatgctttctcaggcacgggtaggtaaaagtctggagaaatgggttctctccatgcccaatgacaaagcaagacggtcctaggtttgaggttaagagcaggtcccattgccgggcggtatccgcagctcacagacctcgggccgcgaccacg

SEQ ID NO: 1004 - DNA, 211 bp, Homo sapiens
gctggggttggctccatgaccaaggtctatgggggacgtcagagaaacggcgtcatgcccagccacttcagccgaggctccaagagtgtggcccgccgggtcctccaagccctggaggggctgaaaatggtggaaaaggaccaagatggcggccgcaaactgacacctcagggacaaagagatctggacagaatcgccggacaggtggcag

SEQ ID NO: 1005 - DNA, 318 bp, Homo sapiens
  misc_feature 175, 237, 248, 249, 250, 275, 278, 311: n = A,T,C or G
aaaatgtacccaactgggaccaaatacaaacatgagacactagggtggcttgtccttgattaggaattaccagcttaaggaactttatcatgggctgagagatagatagatagcttagaacaacattgcaaaagtgggtgcttctacatgaggactttttttccccccaagtagnacaataattaaatcttgtgtttctttatattgtgctttttttgggagaaagcaattcatttnccgatctaaannntgccggatacaaaggtagttcaganacntaataatggtccctccaagaacaagggagcaancccccta

SEQ ID NO: 1006 - DNA, 491 bp, Homo sapiens
  misc_feature 403, 440, 446, 457, 467, 472, 482: n = A,T,C or G
aaatgactaaaaacgaggccacactttaattcaattggaaaggaaatgcagttggaaacagagcataattaacgctactgaaaagatggatatttgggaccaaagttcatttgctccagttgagagtaagttttcaggggattaacttgggaatggtgcagtgtaatctagatcacgctcccaagacctgcaccaaagagaattatggttgccttttgagctactgtatgactctatttgcctttcacataactagcttccccaagcagatctgcctgtgaatattagacattactatggtgttagtgatcactcccagtacccacagtccatctcataattggaaagtatgaataggaaagtatttgtaatcagtgtcattgcaggggaaggagtactctangccagtggcctaaatcaatggacctggcccgggcggncgctcnagggcgaattncacccactgngcggncgtatctagngggatccca

SEQ ID NO: 1007 - DNA, 491 bp, Homo sapiens
  misc_feature 380, 381, 407, 424, 429, 445, 488: n = A,T,C or G
gcgagaatgaagactattctcagcaatcagactgtcgacattccagaaaatgtcgacattactctgaagggacgcacagttatcgtgaagggccccagaggaaccctgcggagggacttcaatcacatcaatgtagaactcagccttcttggaaagaaaaaaaagaggctccgggttgacaaatggtggggtaacagaaaggaactggctaccgttcggactatttgtagtcatgtacagaacatgatcaagggtgttacactgggcttccgttacaagatgaggtctgtgtatgctcactcccccatcaacgttgttatccaggagaatgggtctcttgttgaaatccgaaatttcttgggtgaaaaatacattccccnnggttcggatgagaccaggtggtggtntggtcagtatccccacnccccnaaagaggaatttaatncttgaaggaaatggacatttgagcttgtccccccccccccggnttt

SEQ ID NO: 1008 - DNA, 346 bp, Homo sapiens
aaaccaatcttccaggagattaatcaatgaaatttataagttttatcaacgtataaaattttttccatcttctgggactcatagaatacaatctgtgtttctgaccagttgaggtagttaaaatagggagggcttttctaatttcgtatttgactatttcagaaagaaaggttatcttttactggtgagcacagtcattgctctgcagatgggctaggattcaaagaatataacacagtgttgttatcataaagagtgttgaagtttatttattatagcaccattgagacattttgaaattggaattggtaaaaaaataaaacaaaaagcatttgaattgtatttg

SEQ ID NO: 1009 - DNA, 143 bp, Homo sapiens
aaagccttcccaaatattagtaatcttgaccagcaatgacaagaaaaaagaggagcacctttacaagcagttgatatccaatattaaaataattgtggctttaaaaatatttctttaaattcttgcattacacttttcttttt

SEQ ID NO: 1010 - DNA, 716 bp, Homo sapiens
  misc_feature 418, 465, 489, 505, 512, 517, 527, 547, 562, 563, 566, 579,580, 589, 602, 611, 618, 647, 648, 660, 689, 693, 710, 714,715: n = A,T,C or G
ctgacaggtgtacttaaaaatactgaattgacagctacattgaatgcagggtttcccagggtagttctcattttgtcacttactccaattacattcaaggtcgttatgcctcatctttttcctgagctgtggcagctctaactggggcacccagagagatacataccaggtaatctccacttctacttttctggtagcttggccctggcaaaatgagccccacaatctagaaagtaggatgctaaacaaagttgaatcaacatatctttttagaaaatatcaggttagagaatactcctgaggacctgtttctaaccagagttgacaaatgtgaaaaatgcatcagctagacagcagtcatgtgaacacagcccggaactgcaagtcaaggaaatgggttctgggcccgccttcccangtaccaaaaccattattcaaaagcaactactgaaaatgccagcttgntggggaaaagaaatggggaaacgngataaatccaattaantgcatgnatatncatgaatacnaaagctatatggaaaaaatnaaatcaaaccctttnnacnaagaagaattggnnacctcctantttttggcccaangtaaaaatnaaaaacnctgggataaattttgcccttaggcctttnntgtgagggaaanatttaacttggggaaaaaaacgattttanctgnccggggggccccccaangggnnt

SEQ ID NO: 1011 - DNA, 565 bp, Homo sapiens
  misc_feature 476, 498, 501, 522, 530, 549, 551, 552: n = A,T,C or G
ctgcagaatggctcccgcaaagaagggtggcgagaagaaaaagggccgttctgccatcaacgaagtggtaacccgagaatacaccatcaacattcacaagcgcatccatggagtgggcttcaagaagcgtgcacctcgggcactcaaagagattcggaaatttgccatgaaggagatgggaactccagatgtgcgcattgacaccaggctcaacaaagctgtctgggccaaaggaataaggaatgtgccataccgaatccgtgtgcggctgtccagaaaacgtaatgaggatgaagattcaccaaataagctatatactttggttacctatgtacctgttaccactttcaaaagtaagttctccatcccataaagccatttaaattcattagaaaaatgtccttacctcttaaaatgtgaattcatctgttaagctaggggtgacaaacgtcattgaccctttttacctcgggcgngaccacgcttaggggcgaattncanccacttgcgggccgttctagnggatccanctcggaccaagcttggcgnannatggggcatagtg

SEQ ID NO: 1012 - DNA, 407 bp, Homo sapiens
  misc_feature 317, 320, 330, 332, 342, 349, 351, 366, 371, 400: n = A,T,C or G
ggcgttttgatgccatgccgtttactttaagagcatttgaagatgagaagaaggctcggatgggtgtggtggagtgcgccaaacatgaactgctgcaaccatttaatgttctctatgagaaggagggtgaatttgttgcccagtttaaatttacagttctgctcatgcccaatggccccatgcggataaccagtggtcccttcgagcctgacctctacaagtctgagatggaggtccaggatgcagagctaaaggccctcctccagagttctgcaagtcgaaaaacccagaaaaagaaaaaaaagaaggacctctgncgngaccaccccnanaggggaattncaacacncntttgcggcggtcttntggcntccagctcggtccaacttggggtaatcanggggtcc

SEQ ID NO: 1013 - DNA, 237 bp, Homo sapiens
ctgtgggctaattgccgccaatttcagcctgccacgattcttggaaatatgtcttccaagtgccatccatcatcagtaggacaagtgtcgggagtttgtttatttttttccagtagcaacgatgggttacatggagccatgaaacctccttctggcctcccttgtgattaatggcatgtgtttgtaaaatggatagctggggttggcagatggctagagaagaatcgcctttggttt

SEQ ID NO: 1014 - DNA, 669 bp, Homo sapiens
  misc_feature 415, 469, 503, 573, 589, 600, 613, 626, 633, 646, 657, 661,668: n = A,T,C or G
ccagggattgtcggtgcagggtctgcaggtaggcagtcaggttgtgaatgcgctgggcatccagaaacttgcggatcacgtaggatggctccaactttccaatggttcggatatattgctggacagccccatcgtggttgcccttgctgtagagatggtctccatactgcatgaaaatctgggccggcccatcactgtccagatgctggctcttggcaaggttaatcgccatctcaaataggttcttcttaaacagcatctccagtttggtctgtgtgtccttctcctgcagtgcgtggacccgcccatcccgcgtcagcacgtacagggagccccactcagcaagcacatccactacatcctcaaagacggtgctataggctatgaacttgttgcacaggtcatagatgtttanaatctgcttgtcggagctctgtgaatccctgctggtaaactcttgacttggganaaaaccttccggcacgggagacaatgataaggtngcctctaaaccagtggcaatgaacttatggccctaaaggcaaacaaggccacgttcatcaggtggacagnagaacctatcccggcncatgaatgagnctaaaaggcctanggtacacgaagcncacctgngcactcccaggantttcaagcttntgantgactcng

SEQ ID NO: 1015 - DNA, 494 bp, Homo sapiens
aaataaggtgatagtaaattataccttgtagttaatagtaatcaatcaatcaatcactacagtaatcacaaataaggtaaagtctaaattactgccttagcaaacactatgttgtcaggtttttctgctgcaagcccaaggcgggaaacactgcagttattagaagtgagcccaatgatgaatttgcatttgaagctgggagaaagaggaaaaaaagtgtgttctgattatggcatcgagacactgtagcctaaaaaagcaactttattaatgtcctgcagcagcgtacattagtaattataacaatgcattaaaattttcatttcatgtcatagagaatcagttttcttcatgatacattatgttttactgagtgagtttgtccctccagagacctttctgggaacatgccttctccagggactgcttcctaagatgcccaggttgcttaccacaggtcatctttggtcatttacctcgggccgcgaccacgc

SEQ ID NO: 1016 - DNA, 98 bp, Homo sapiens
ctggcaaaataacacacagtacacaaagaacagtgtattttacagagtcagtaatgaaaactgacagctctttagcagatatgcttttttcatttttt

SEQ ID NO: 1017 - DNA, 458 bp, Homo sapiens
aaaaagatgtttggatatatttgagtattccgatcatgaaaacagaaattgccctgcctactacaaggacagactgatgggaaattatgcacctggtcaacttagcttttaagcagacgatgctgtaaaaactaacggcttctctgatatttattgtaagttttagtactgatctccttttccagtgctgcacactcctggtttggaactttaatagcgttgcaacgaaatcctatatccagtttcctgtaatttaattgaagaaaaatacatccaaataaagactttattattaacagaccagatagcatcagaaatcatgtgactgttatgattatcagaatgtcttaactttttagggcaaagttaacactgaaagttctagcttaagtgttgaaacttttgtgggaaaaaaaatcacttttgaaactcagacttcagtgtatacccaataattt

SEQ ID NO: 1018 - DNA, 654 bp, Homo sapiens
  misc_feature 506, 530, 547, 548, 592, 600, 605, 610, 619, 624, 632, 634,638, 642, 647: n = A,T,C or G
ccattcttgaaagaaaaaagctgcaaataacattttcaagaatataaaaaaatgagtaaacaaagggaaggttgtttggtcatttatagacaattaagcacagactgtagatgtccttccaattcttgggaggctaaactgagtctaccatttcttacatttcttttacctattttttgagaattgccagttgtacagtgtttagcatgtggaatgtaccaaatatatctatgttgtgacttaagatattctaaatgtggataacttctgacctaggaaacatgaagtttgtagtgaagtaagtgaaaagaatgttcaggaaattttttttctccatctcttcagttggcatttattgagagttttatttgaatgcttattaaaagtatatgatttataatatttagaaaatagaagaaaaaagaaaactgtagatgttttatcttggtttaatactggatggtttagtaccgtataccatttatggttctagtgggatcaaaatntttcattttcattaaaagtgaatncaaattttcccttattnnaaggcccattttacctcggcccgcgaaccacggcttaggggcgnaattccancaccnctggnggccggttncttangggatccnancttnggtnccagnttggggg

SEQ ID NO: 1019 - DNA, 240 bp, Homo sapiens
  misc_feature 219: n = A,T,C or G
ggcagggcctagctgctacaaagaagacatgttttagacaaatactcatgtgtatgggcaaaaaactcgaggactgtatttgtgactaattgtataacaggttattttagtttctgttctgtggaaagtgtaaagcattccaacaaagggttttaatgtagatttttttttttgcaccccatgctgttgattgctaaatgtaacagtctgatcgtgacnctgaataaatgtctttttttt

SEQ ID NO: 1020 - DNA, 398 bp, Homo sapiens
  misc_feature 274, 285, 311, 353, 357, 360, 364, 382: n = A,T,C or G
ctgctcttcatttattttgaaagcaaattcatttgaaagtgcataaatggtcatcataagtcaaacgtatcaattagaccttcaacctaggaaacaaaattttttttttctatttaataatacaccacactgaaattatttgccaatgaatcccaaagatttggtacaaatagtacaattcgtatttgctttcctctttcctttcttcagacaaacaccaaataaaatgcaggtgaaagagatgaaccacgactagaggctgacttagaaattnatgctgactcnatctaaaaaaaattatgttggttaangttaatctatctaaaatagggcattttgggaatgcttttcanaganggncaantaacagtcgtacagctanaaaagtccctgaaaaa

SEQ ID NO: 1021 - DNA, 363 bp, Homo sapiens
  misc_feature 72, 77: n = A,T,C or G
gaggtcagaagataaagacatcctacctttgagccttttagaacaggtatccagggattttacctctccagngctangcagggtctatgcccataacatcagcaggaagcagttacagaagatgaacctccgcccttctgcaagccccttaagattaaggaggagtatataatctctgatggggaaatgaggtaggagaccagaaggacttattttccattcccaaccccattgaacagagcaggatctggtcaaaacagggtgcagtggagaagcctgctgaaaccagcagatgatgatgaaagtgacctctagttgccctcactgcttatgagcataaagacactaccactgggaccatgg

SEQ ID NO: 1022 - DNA, 479 bp, Homo sapiens
  misc_feature 323, 335, 357, 385, 392, 406, 435, 445: n = A,T,C or G
aaaaagtatgttctaaaattattatatatacatgggtgaattatgtttccgaggcactgttttatctctgtgaatcttgaataacttttttatatttgggttatgatgtcaaacgatcctaagcgaagatgatttcagttcatcaaatcatcattaatgactttatgtattatttgcacagggagaattgaaactgagtataatcaataagctagatcgaaaatcagtttctcaaactgagcttcagaaaagggcattttggactcttggttttgcataactgggtttggtttttttgcagaattaactataaccaatcactngcttcccgaagnaaacctggatgtacctggaatnccattattaccataacctttccaatttntttaccnactttctggtttangccgaaccttgggattacccttatttttnccggggtccngaatttaaaaaaaaaaaaaaaaaaaaaaaaaagc

SEQ ID NO: 1023 - DNA, 465 bp, Homo sapiens
  misc_feature 433, 450, 451, 452: n = A,T,C or G
ctgggtaccattccgggtcatccgcagaaattcctcatagatggcaactctgtctactctccgagccagtggcgagaagttacacagggagtccaccccggtgtggtgcctgttggggacagacctgaatgttgaaacttgacagtcagaaaaataactcttgatgctgctgtttcggaagagttggttgagcgcatcctcaatattccttttgttcctctggtaattggtggtgcctggctgggctttgtcctgggaatatggtaggttggtgatggtgaaattcaggtagaagtgctgggtgctggagctgcttgttggttgataaactgatgactccatttctgtcacatggatgtccaccaactggtaggtggagcccagccaatggaatgaggacctcgcccgcgaccacgctaagggcgaattccancacacttgtggcgccgnnnctagtggatccga

SEQ ID NO: 1024 - DNA, 210 bp, Homo sapiens
aaacaaagcaaaacaaaaccaccaatcctaataacccccctccctgccccgtctccacgctgtgcggagagggctctagcccctcagtcggacttctccttctccttcatgtgcaagaagacgatgctgaagatgaagagccccagcatcatggagaaggcgctggcgtagtaggggtaggccgaggggatgaagcgctcatactgcgtg

SEQ ID NO: 1025 - DNA, 609 bp, Homo sapiens
  misc_feature 473, 514, 538, 546, 548, 553, 561, 569, 595, 604: n = A,T,C or G
ctgggtaccattccgggtcatccgcagaaattcctcatagatggcaactctgtctactctccgagccagtggcgagaagttacacagggagtccaccccggtgtggtgcctgttggggacagacctgaatgttgaaacttgacagtcagaaaaataactcttgatgctgctgtttcggaagagttggttgagcgcatcctcaatattccttttgttcctctggtaattggtggtgcctggctgggctttgtcctgggaatatggtaggttggtgatggtgaaattcaggtagaagtgctgggtgctggagctgcttgttggttgataaactgatgactccatttctgtcacatggatgtccaccaactggtaggtggagcccaccaatggaatgaggcattcagggtcttatctagaaagacttgctccaccaggctggggtccaaattggaggagaacaatgccttgacagngaccacacggagtccatcgtcaattggtgaccaggcagaancggaatgtgtcatgagttgactgnctttgtananggggngaccttgnctggatgncctcacaggggatgacttgaggatgnggggctggntactg

SEQ ID NO: 1026 - DNA, 590 bp, Homo sapiens
  misc_feature 196, 531, 539, 540, 541, 551, 552, 571: n = A,T,C or G
ctgagaaatctaggtggattcatattcgtaatcattgattaacatgcacatttgggtttgcacatttttgtttatcatacatttttctccgttttctattaaagaacatgctctaggggaactattaatagcccaccagtcgggtaggcagcattcaatccttctatgccttctttcgccacctgttgaggtcttncttctgaaacaaagaagaaatagacaaatcagacttgccctcttggaaatgtggtccagatttctctactcccaagctccaaaaaaggcatacattggatgggctagatcaactcctcctgagagccataaatccgccaagagttgttttccatgtaagggtgtggtacaatggggaacgcctgatgttggaggaaagcaggaggactttagagtggagttgcattctaatctctctgccgcttcaactatgtgacctggggcaaatgatataaactctatgagcctctttccttatctttacctgcccgggcgggcgctaagggcgaattccanccactttnnngcggttctannggatccaactcggaccaancttggcgtaatatgggata

SEQ ID NO: 1027 - DNA, 396 bp, Homo sapiens
  misc_feature 69, 88, 121, 127, 129, 177, 266, 275, 316, 332, 335, 348,366: n = A,T,C or G
gtggtctcgagctcccaaccttgtgatccacctgcctcggcctcccaaagtgctgggattacaggcatnaaggataacgttttttttncccatcactggcacttgcccttaatccaagtcnttttgnancccccctttttgtttttgggcctgcttaattagctatatgcatcctcnagggctgagaaggaaggaagggaaagtccccaagtggatttttagtcttcacccaatgcagaggcagttttgagttctgtggacagcanaagcttcanttctttgatgtatctatactgggacctgcccgggcggccgntcgaaagggcgaattncancacacttggcggncgtactagtgggatccanctcggaccaaacttggggaaacatggcata

SEQ ID NO: 1028 - DNA, 282 bp, Homo sapiens
aaaaacaaaaacccttaacggaactgccttaaaaaggcagacgtcctagtgcctgtcatgttatattaaacatacatacacacaatctttttgcttattataatacagacttaaatgtacaaagatgttttccacttttttcaatttttaaacacaacagctataaacctgaacacatatgctatcatcatgccataagactaaaacaattatatttagcgacaagtagaaaggattaaatagtcaaatacaagaatgaaaaacgcagtacatagtgtcgcg

SEQ ID NO: 1029 - DNA, 311 bp, Homo sapiens
aaaggcaaagctttattttcatctctcatcttttgtcctccttagcacaatgtaaaaaagaatagtaatatcagaacaggaaggaggaatggcttgctggggagcccatccaggacactgggagcacatagagattcacccatgtttgttgaacttagagtcattctcatgcttttctttataattcacacatatatgcagagaagatatgttcttgttaacattgtatacaacatagccccaaatatagtaagatctatactagataatcctagatgaaatgttagagatgctatatgatacaactgtgg

SEQ ID NO: 1030 - DNA, 144 bp, Homo sapiens
aaaacaagcaaattttattaaaggaaaattttgcaggtttaaggtttgcaggtgaaattttgtaggtgaaaaggtttacttttcaccagtctgttctggcatgcttctaatgatgtcagagtcacctggatcaatgatagccag

SEQ ID NO: 1031 - DNA, 79 bp, Homo sapiens
aaaagttgctattaccaattctgtctactgtagcaagataccttaagttacaacaaaatcttaggaaataagactgaat

SEQ ID NO: 1032 - DNA, 550 bp, Homo sapiens
  misc_feature 89, 92, 93, 110, 145, 194, 238, 335, 336, 342, 363, 381,397, 434, 470, 474, 507, 511, 526, 536, 538: n = A,T,C or G
ccaggagctgtctttggggctggggatacaacagagaaacaaaccaggtgttgtcatttcccagaagtcacaatatttcaagggaaaanttnnaatccaggtttcactgntttcaaaccccaggttgattattaagtggacagcntttcctgtagtccagggaggcccaaagaatgttcgtagagggtcttggnttagggtttcttattaacagagtgaacaggaaccaaacaccaantggaaatggagggtgatggctttggtggggggggtccagtctaattgttcttcatcgtctcctggatccagtccacatatttgcagactttcgtgtnnacccangcttttcgggtgatccacacnggatcctggccccagganataatgccttgaaaanactggttcaaaccaaaaggcccccggagtcccctggnaggatccttgccccttctcacctggacacccatggngttntatttcccgggagcgtctacctttgggtaactngcgnaccctagggatcacnctggctctangncactgccactgg

SEQ ID NO: 1033 - DNA, 293 bp, Homo sapiens
aaatcacgttttgtttctgcaaatttgggagacaaattgagttcttactggaatgtggcctatcgctggttgacaaatctgaaatggaatgtctccaaatggcagtgcctccctttccgccctccctaggaccacaccaataaccagctcccaagcacaagttcttgctcccattttttctgtaggggtgggggtgggaccttcaggctgctatctttgccatctgctgttctaacttggaaatacgctcatcttgattgcagattgtgtcttttatagatttgatctctttt

SEQ ID NO: 1034 - DNA, 605 bp, Homo sapiens
  misc_feature 454, 522, 553, 577, 579: n = A,T,C or G
ctggcattccttcgacttctctccagccgagcttcccagaacatcacatatcactacaaaaatagcattgcatacatggatcaggccagtggaaatgtaaagaaggccctgaagctgatggggtcaaatgaaggtgaattcaaggctgaaggaaatagcaaattcacctacacagttctggaggatggttgcacgaaacacactggggaatggagcaaaacagtctttggatatcgaacacgcaaggctgtgagactacctattgtagatattgcaccctatgacattggtggtcctgatcaagaatttggtgtggacgttggccctgtttgctttttataaaccaaactctatctgaaatcccaacaaaaaaaatttaactccatatgtgttcctcttgttctaatcttgtcaaccagtgcaagtgaccgacaaaaattccagttattatttncaaaatgtttggaaacagtataatttgacaaagaaaaatgatacttctcttttttgtgtccccaaatncattcaaagctttgttcttttccattcattnaaagttcatgggtatataaaactncnttttaaccctggtttctgatctacct

SEQ ID NO: 1035 - DNA, 695 bp, Homo sapiens
  misc_feature 519, 540, 553, 575, 578, 586, 609, 621, 631, 644, 651, 653,662, 681, 686: n = A,T,C or G
ccagtcatttatttttccagtaatttaaagctgtgactaggagacacagcctctgtgggttgtgagggttgagatgatataaactcaggagctgtcgggtggacatgttcactgagaaggacagtcagtccacagagagagaacaccgccaacatgcaggggggtctagagaacacagaccatgtggatccgagagtgttggaggggcagctctagcttctctgggcttttcggatccgagttctgttcctgggaggcctggctaaaatctacccttgggccctgcactcctccccatggctatattgcaaatatcctatactttgcatgtgatcacacaaagagggtttctgttactggcacacaaaaagtttgcctgagatgattctcctccacttccatcagggtcttctggcattgatttcaacttattctctcttaagaacccattgagtccccataatctcttggttctttcttttccaggaccactgctacagttcaaacctcattttgctntattacttggaccttgatggntgatgcctaacanacccaggtttttaaaaaccttnttntccccttnaaccttgggatcccctttccttnacccccatggcncctgataccncctgggtccattnccaaacncncccagggcnggaagggtgttaaaatttnccaanccggtaaaa

SEQ ID NO: 1036 - DNA, 245 bp, Homo sapiens
aaaaagtagttagcatttaatgaaactccctccatgtggcttcaagccaccaggacacaggcccccccaacactcttaatcttctcctcagctcttctgctgaagaatttggccttcacgatgacaggctgctttgggagctttccctttcccagaactttgtagtagcccgatcgcaccacatcaatgatgggagcagcccccgtcttgtttttagcagcattcacccgtgtctgttcactgac

SEQ ID NO: 1037 - DNA, 229 bp, Homo sapiens
ttggacccttacacacttcctaatgacagaatttggctgtttggcttcaactcctactttttccagcacgattccttttgcatgagaagcacctccaaaagggttggcctttagggctgtgcccaaatgagctttcttatactgtttatcatgccacttctggtctcgtcggtgactacggagcttcctagcagtacgaagtccacgacacttgcccatcctgtcggcg

SEQ ID NO: 1038 - DNA, 192 bp, Homo sapiens
gtgggacttactccctcctctcctttgagaggcccatgtgtcgctggggaggaagtgaccctttgtgtaactgtaaccgaaagttttttcaaaaatcctagatgctgttgtttgaatgttacatacttctatttgtgccacatctcccctccactcccctgcttaataaactctaaaaatccacttgtattt

SEQ ID NO: 1039 - DNA, 214 bp, Homo sapiens
ctgcagcccatcctcccggctccctcctagtctgtcctgcgtcctctgtccccgggtttcagagacaacttcccaaagcacaaagcagtttttccccctaggggtgggaggaagcaaaagactctgtacctattttgtatgtgtataataatttgagatgtttttaattattttgattgctggaataaagcatgtggaaatgactcaaaaaaaa

SEQ ID NO: 1040 - DNA, 524 bp, Homo sapiens
  misc_feature 264, 322, 379, 408, 461, 483, 518: n = A,T,C or G
ctgtgggtggttttcctgttacgacgctcagtagcctgtagcaataacaaactcgtggctatgaatgcagatgcagtgttctcatagaataactgttcctgcacttttacagacaaatctacgacaaaaaaaaagatcaactttttttttccgaacaacaaaaaaaatgaatgattacaataggaaagggaaaaattaaatagctacatatcattaacaaattaatgttcttcaaaaaatacctacaaatttctctgtacattntttacgcacagcgtaacgatggtctcaaaatcacccatatagaaaagtgttctcaacnatttttcctacagaaaatataggggcctgaatgccaaagcttggaagcccagtacantgggagtgaaatgtgtgcggggcaagganaagggctttttttcctcccttttcaaaggctgcaccactctgtgactacaaanccagcctccaccttttccccangccattccaaatcacactaaaactgaaaccggggnatcggt

SEQ ID NO: 1041 - DNA, 429 bp, Homo sapiens
aaacaagactccagtatgtgaaggttaattgctgtgctccacagatcttgtctattggcccctgtagaaagttaacctttgttgttttccttttataatttgcttattgcacaattgctttagggtaagtgaattatattaagatgccttgaaattatagcactccttgattaagaagctaaaatgtttctctcatttactccttaaacaaaagacttaaattagtttgggtcattattacttttattttgcagcatttggtttgttattagcgtaagagcaagtataggatatggagaggcccctggcttcatgagaacaaaggcaggcccaggttataattacagctttctcctgccccttctttactttctctaccacagtcttctccactgtttgttttcctcttgccacaatttgctaacattt

SEQ ID NO: 1042 - DNA, 313 bp, Homo sapiens
ccagagtctgtcacactaagatgagaaatgtcctttcttcctgaaggtgtctgatgtgtaaaaatatgatatactttgtgctgtttcctcccttcccttttgcatattattctgaaacaacattaactagttactttgcgtcattgaaggtatgcacttcccctctatgttaggagtgaataaaattaaaaatagatccttataacaaagaaaggcagatagaatgattaaaaatgaccaaaacatgttagaaacagtctctcaggtgtatgcagatggtaattacaaaaatactttttcaaaaagaaaaaaa

SEQ ID NO: 1043 - DNA, 299 bp, Homo sapiens
aaatttgaccaaaaaaaatttattgtacaattacccaccactggatttgactcagagaggacccccagagggtgtctccatcttccctatttattttcagcccttgagggcttcattgtagatcaaagccaaggcccccaggaaggtgacatactcctggaagttcacctcctggtccttgttccggtccaagtcttccatcagccttgcaatttcagcatcctgcagcttcgagccaatggtgagctccttctggatcagctccttcagctccttcttgctcagggtgtgcttgtcac

SEQ ID NO: 1044 - DNA, 135 bp, Homo sapiens
aaagcgctgatcctgtttatttggcaggaaaacgagacaatccagcagcccaggagggacaggtggacttaatcctcctcctcgtcgtctccagccccagccccaccctggcccttcttggcattcttcctcttc

SEQ ID NO: 1045 - DNA, 608 bp, Homo sapiens
  misc_feature 462, 563, 566, 571, 588, 598: n = A,T,C or G
gtatcctagctgacaaattattgattaataagaacttgaatttctggaagattcttactgttaaccaaattttgagcaaggagtctcaaaggtaattctgaaccagaattacatgttaatgaacagtgtaccttttaacagtgtaaatcacggaatatccgtgaagggatttcttaatttattttttaccggttgattgaaatatcagttaaaggttgccagcatggttgcagataaactgatgtttgaaattcgctgaaatacttaatgtggaataggataatatacttccaatgccctcaaggctgtgaccttacagccattttacatagcacatcattcctcctatagggatgaactttttcctggcacgaaaagtagcccgctctggttgaagctttgcttattgtaacaggcttttatttccaggtaatatgtctttggaagacttaatttgattanagatatagatattctggaaactaatggttttttctatgaccctgctttatcaaaaagtaaacattacctcggccgcaacccctaaggggaattccaccacntgnggcgntctatggaccaactcgnaccaacttgngaatatggct

SEQ ID NO: 1046 - DNA, 347 bp, Homo sapiens
ctgttaaagagtggaggacacccttgaccctaacaaggaaaacaaattaagcctttatgtacaagcaaatttagagctcttttaagtgtccaaagctattaattagtttaattaaggcattaaactaattctgaattaacatttttataaccaagaactaaaatgttcaaatttttttctagtacaaaaaaattaaatttgctttagttataaaagagctctgtcaatatacacaaactatatacttcagacattcacaaaaatgtgagcagaaggcttatcaaaagacatttaatacaattagttttcaacaaccccttggtggtccacatctacaaagatatcca

SEQ ID NO: 1047 - DNA, 307 bp, Homo sapiens
gccaccgaaagcggacaccctgactctcagaagcccccaacgcatcccgggacgagtgacagctattctgcccccagagactgcctcacacccctcaaccagacggccatgactgcccttttgtgaacacaatgtgaaagaagcctgctgtggtactgagcgtcgggctgtcacaaggcactggaagaagggagcctgctggtccagagtgtgcgtgtgtatcggtgtgtgtgtacacttgcatgtgtgtgtgtgatccagtaggatcctagagacaacctgtcatactgtttacaaaattgtgcag

SEQ ID NO: 1048 - DNA, 227 bp, Homo sapiens
tggaagatggacgcaccctgtctgactacaacatccagaaagagtccaccctgcacctggtgctccgtctcagaggtgggatgcaaatcttcgtgaagaccctgactggtaagaccatcaccctcgaggtggagcccagtgacaccatcgagaatgtcaaggcaaagatccaagataaggaaggcatccctcctgatcagcagaggttgatctttgctgggaaacag

SEQ ID NO: 1049 - DNA, 720 bp, Homo sapiens
  misc_feature 4, 28, 92, 108, 168, 183, 215, 226, 246, 262, 267, 277, 283,296, 308, 311, 344, 347, 353, 362, 363, 369, 372, 376, 389,415, 440, 455, 488, 502, 511, 513, 515, 550, 554, 557, 562,573, 584, 593, 594, 611, 619, 620, 639, 646, 650: n = A,T,C or G
  misc_feature 657, 669, 679, 685, 689, 693, 696, 700, 706, 714: n = A,T,C or G
tggnaaattttgttaaataaccggaacnttcactttattagggggccggaaaattttgggggccccccttctttaggaatgggccattggcnttccgaagcccgggcnccgccccagtgggtggaattgggaattattctttgccaagaaaatttccgcccctttaanccgttggggtccccnggcccgaagggtcttgaaaccaaaaaaggaanttccttggccntttgccaaaaacttcaaaanccccccaccttggcantcccnaattgggccnttattnaacccgcaaaatngtcctttcgggnttnaaaaaactgggaagggaaagtgaaacacttggnaantaaaanaaaccgggnntttgcnttnggtnaaaacacacatcnattttgcacctgggaacccaaaaccnaaatgggtttgttcggtgccacccnaccaaaattgactantttgttggacttaaccaacaatttcttgttgtnaaccacaagggtcncttcttttncntnggccaaattggggagggcatggaaaaatccaccgnaaanttnaaaanaaactggaatnatatttttggntttgggccnnttagaacaaaaacccgnaaaaaaannaattggaaataaacttttncccttgnaatnttttttncaattaaaactnaattttttantttttncctncccnggngggncctttnaaaggggnaattca

SEQ ID NO: 1050 - DNA, 617 bp, Homo sapiens
  misc_feature 475, 530, 561, 562, 573, 578, 581, 595, 599, 608: n = A,T,C or G
aaacttccctctgtggaagatattcaaaagccacaagtggtgcaaatgtttatggtttttatttttcaatttttattttggttttcttacaaaggttgacattttccataacaggtgtaagagtgttgaaaaaaaaattcaaatttttgggggagcgagggaaggagttaatgaaactgtattgcacaatgctctgatcaatccttctttttctcttttgcccacaatttaagcaagtagatgtgcagaagaaatggaaggattcagctttcagttaaaaaagaagaagaagaaatggcaaagagaaagttttttcaaatttctttcttttttaatttagattgagttcatttatttgaaacagactgggccaatgtccacaaagaattcctggtcagcaccacccgatgtccaaaggtgcaatatcaaggaagggcaggccgtgatggcttatttgtttgtattcaatgattgnctttccccattcatttggctttttagagcagccattttacaaaaacagtgtaagntgaaacctgcttgttgcccttagcaaccaannttcaaaattcntttanaancccttttaaaaacnacanccctttttnagggtggca

SEQ ID NO: 1051 - DNA, 366 bp, Homo sapiens
aaaacaggtacaaaatattgaaatgaccaacgttacatgatttcaagggttgtcctttctgtgcttttatctgtcacgacaggaaggtgtggaaagtttatatcgtttatatccttaatttgactactcttggatattaaaatctttctattaattaaaaagacttttagacaacctcttaaatggaattacactatggaaaacagggctcccccaaaaacacctaggcagaactgagagttctttgaaaaccattcccaataaaaactaaatgaaaaataaatataaaacaaagcttaaaaaaatatgcattacctgacaccaaccttttctggctgacaatatttattcatgaaaacatatcag

SEQ ID NO: 1052 - DNA, 86 bp, Homo sapiens
aaaaattagtgtctcaaaaaggggacatcataagggaaatacagggtttagaggtctgagctcaagtggtgtaagacagttctttc

SEQ ID NO: 1053 - DNA, 488 bp, Homo sapiens
tttcctttttggtacttattactgctaagtatttcccagcacatgaaaccttattttttcccaaagccagaaccagatgagtaaaggagtaagaaccttgcctgaacatccttccttcccacccatcgctgtgtgttagttcccaacatcgaatgtgtacaacttaagttggtcctttacactcaggctttcactatttcctttaaaatgaggatgattattttcaaggccctcagcatatttgtatagttgcttgcctgatataaatgcaatattaatgcctttaaagtatgaatctatgccaaagatcacttgttgttttactaaagaaagattacttagaggaaataagaaaaatcatgtttgctctcccggttcttccagtggtttgagacactggtttacactttatgccggatgtgcttttctccaatatcagtgctcgagacacagtgaagcaaattaaaaaaaaaaaaaaaaaatccctg

SEQ ID NO: 1054 - DNA, 204 bp, Homo sapiens
aaaggagatttacttttactgcagctcttcttgcccatcaactgtccaaaaacaaaagactaggaaacagacccagcagcctccacccgacccagccacagggcctcaagcctccaatcagagccgctccatggcacccctcagctcagctcagtgttgcctgggagcaaaaggctcggagacaaagcccagagggtgagcagg

SEQ ID NO: 1055 - DNA, 528 bp, Homo sapiens
  misc_feature 430, 435, 499, 506, 526: n = A,T,C or G
ctgttatttatgtggctcatgatgcttattgagcaatctgcaaaaatagatttcctgtctcacacaggacagggtagatttccagcaagcataatcaaaatctccaagtcttttggtcaaattagagctgccaccatgcacgaggttttacttaaaggtgtttactgatgaataaactcacacttctgtgaactggttcttgcttcttgtgcagctaactctttccacctctctttgttctgctgaatgatgtccaccaggttgttcttgaaactcttcaggtccactgctgcaagggagtagtctggggaataggacccatcactcatggagccttttgtatttgatcgtcttaatgcatcagcaatgtgtaaccccccaatggtggttgagctgcttgccacataagaaagaagtttcggtttttgangcttnctctataagaagaataacaattttctctgttgagtctgcaaaaaaaaaaaatgttggcaccttncccggcnggccgttcaagggcgaattnca

SEQ ID NO: 1056 - DNA, 418 bp, Homo sapiens
  misc_feature 357: n = A,T,C or G
ccaccgggatagccgggggtctggcaggaatgggaggcatccagaacgagaaggagaccatgcaaagcctgaacgaccgcctggcctcttacctggacagagtgaggagcctggagaccgagaaccggaggctggagagcaaaatccgggagcacttggagaagaagggaccccaggtcagagactggagccattacttcaagatcatcgaggacctgagggctcagatcttcgcaaatactgtggacaatgcccgcatcgttctgcagattgacgatgcccgtcttgctgctgatgactttagagtcaagtatgagacagagctggacctgcccgggcggccaagggcgaattcancacacttggcgccgttctagtggatccagctcgtccaacttgcgtaatcatggcatactgt

SEQ ID NO: 1057 - DNA, 281 bp, Homo sapiens
  misc_feature 11, 46: n = A,T,C or G
gattgtgtgtntgtatgtttaatataacatgacatgcactaggacntctgcctttttaaggcagttccgttaagggtttttgtttttaaacttttttttgccatccatcctgtgcaatatgccgtgtagaatatttgtcttaaaattcaaggccacaaaaacaatgtttgggggaaaaaaagaaaaaatcatgccagctaatcatgtcaagttcactgcctgtcagattgttgatatataccttctgtaaataactttttttgagaaggaaataaaatcag

SEQ ID NO: 1058 - DNA, 456 bp, Homo sapiens
  misc_feature 114, 195, 244, 333, 341, 364, 382, 390, 432, 437, 441, 447: n = A,T,C or G
ccctggtccccctggccctcctggacctccaggtgtaagcggtggtggttatgactttggttacgatggagacttctacagggctgaccagcctcgctcagcaccttctctcanacccaaggactatgaagttgatgctactctgaagtctctcaacaaccagattgagacccttcttactcctgaaggctctanaaagaacccagctcgcacatgccgtgacttgagactcagccacccatantggagcagtggttactactggattgaccctaaccaaggatgcactatggatgctatcaaagtatactgtgatttctctctggcgaaacntgtatccnggcccaacctgaaaacatcccanccaagaactgggtattangaagcttncaagggacaagaaaacacttcctggcttaggagaaaactatnaatgnttgnaatcantttcaatat

SEQ ID NO: 1059 - DNA, 365 bp, Homo sapiens
ccagaagggaagtcatccacaaagacctggctgccaggaactgtgtcattgatgacacacttcaagttaagatcacagacaatgccctctccagagacttgttccccatggactatcactgtctgggggacaatgaaaacaggccagttcgttggatggctcttgaaagtctggttaataacgagttctctagcgctagtgatgtgtggacctttggagtgacgctgtgggaactcatgactctgggccagactccctacgtggacattgaccccttcgagatggccgcatacctgaaagatggttaccgaatagcccagccaatcaactgtcctgatgaattatttgctgtgatggcctgttgc

SEQ ID NO: 1060 - DNA, 281 bp, Homo sapiens
cgcgagcgaacgaccaagagggtgctcgactgctagagccgagcgaagcgatgcctaaatcaaaggaacttgtttcttcaagctcttctggcagtgattctgacagtgaggttgacaaaaagttaaagaggaaaaagcaagttgctccagaaaaacctgtaaagaaacaaaagacaggtgagacttcgagagccctgtcatcttctaaacagagcagcagcagcagagatgataacatgtttcagattgggaaaatgaggtacgttagtgttcgcgatttt

SEQ ID NO: 1061 - DNA, 82 bp, Homo sapiens
ccacaggtgatcctcccacctttgtctcccaaagtgttgaggtaaaaggcatgagccaccacactcggccaatctaattttt

SEQ ID NO: 1062 - DNA, 613 bp, Homo sapiens
  misc_feature 359, 435, 470, 490, 508, 527, 542, 551, 567, 568, 574, 585,586, 590, 607: n = A,T,C or G
gttgaatagatgggggatccagagccaactcaggcccccctactcccaaatgtcatcaaacagattgaattcctaagggcagatgggagcaatgggacgccttgacctctcagtctcttcacttgcagtcatcatgtggaaccgtggcctgtaccaaaacagtacctgatgaaagctgccattacagtatacaactgcaccccaggcctgcctcataccaaatcattctccttcctttccaggtacgagtgcttccatatccatttacccaccattggcaatttgaaaggaccatccagacccccataggatccacatggaacacccagagggctttccaaaagctgactactcccaangtcgtcaccaagccaggccatatcattaaccccataaaagcagaagacgtgggctacccggtcttcctcaaggtcnggacctgtctgtcatacagaaggaattccaaaacnaaatcacccacaccgtcacnaaaaaacaaaccttcccngggcgggccgcttccaaangggcgaaatttccancacactttngggggccgttacttanngggatnccaacttcggnncccnaaccttgggggtaaatnattggg

SEQ ID NO: 1063 - DNA, 173 bp, Homo sapiens
  misc_feature 156, 163, 167: n = A,T,C or G
gagaattacttcaaattgagtaattcagaaaaactcaagatttaagttaaaaagtggtttggacttgggaacaggactttatacctcttttactgtaacaagtactcattaaaggaaattgaatcaaaaaaaaaaaaaaaaaaaaaaaaaaaaaangcccccncccngggggg

SEQ ID NO: 1064 - DNA, 379 bp, Homo sapiens
  misc_feature 372: n = A,T,C or G
ccagcaggcgcatgaaggcaagttgggtagccatttccttggaagtcactccttctacattatattcaaactggctgccagcattgatagtttctcctagccagacgtgtttcttgtccttggagctcctataccagttcttggctgggatgttttcaggttgggcccggatacaggtttcgccagtagagaaatcacggtatactttgatagcatccatagtgcatccttggttagggtcaatccagtagtaaccactgctccactctgggtggctgagtctcaagtcacggcatgtgcgagctgggttctttctagagccttcaggagtaagaagggtctcaatctggttgttgagagacttcagagtancatcaac

SEQ ID NO: 1065 - DNA, 280 bp, Homo sapiens
  misc_feature 252: n = A,T,C or G
atcagaattgttgacttgcattcagaacataaatgcacaaaatctgtacatgtctcccatcagaaagattcattggcatgccacaggggattctcctccttcatcctgtaaaggtcaacaataaaaaccaaattatggggctgcttttgtcacactagcatagagaatgtgttgaaatttaactttgtaagcttgtatgtggttgttgatcttttttttccttacagacacccataataaaatatcatagtnaaaaaaaaaaaaaaaaaaaaaaaaaaaa

SEQ ID NO: 1066 - DNA, 599 bp, Homo sapiens
  misc_feature 392, 443, 453, 464, 474, 539, 552, 580, 581, 583, 592: n = A,T,C or G
aaaggctttttattaggaaccaggggaatgagctgcttatccctctataacagtctagagcaggtcatcaggcccaggatggagagaggttatcaaaggtgctgtggtgtgctttgctgcacgtgcttagggcctggaaggaaaggtggtggcaacagaggttggcaggaactggtgttagtcaaaacaccaaaatcctgggggagagcccctctaccttccttctaactccacttgaggtgggagcattccaggagacagagaatgtgaccaggatgcagcagtgtcatctgaacccctggcttcgttcagtgctacttcacttgccagccctccactcttcttgccttttagtgattaggtatttgaagaactcatacacagaccatgcnatggctgtggaggggatctggtaaattactctggctgcccctcggaaatangcggcccccnctcttgatatncgcctgaagnactaccatcctgtattgctgtatgtgtagtcaaaccagactctgggtgacatgtttgaactccangggtgggtgggantcactctccactcaaagactgactggtnncnttgggtaancctcgat

SEQ ID NO: 1067 - DNA, 138 bp, Homo sapiens
aaaaagtcttctccagtcttccaactgtgagtccttgggcctgttgacaaatgttaaacacactgagacgtcctgaactggatggtagagtcaaaggaaaaacattccccatttgcaacaaaggagaaacccacttgg

SEQ ID NO: 1068 - DNA, 304 bp, Homo sapiens
aaaattcagcaaaatcatacgccatctaccgtgatgactgccaactccatggcagaccctttctgggattcaaaaaccaattcatcagatcgctgcctctgagggatgtacagattggctggggagctgagtgctacaataaaggaggaagtaccggggaacagtgcagggcaaaggcaggaaagagatctgagctgcctggagatcatctggggtgcggagtacaaagctttgcaagggtgtggttttggaatgacgctaaactgaaggtggagagaacagataaaaaggttggaagttgcac

SEQ ID NO: 1069 - DNA, 375 bp, Homo sapiens
ctgcatatacaattttctaaaagaaaatcctaaaggtgggttcttattgtatatggaacagtgaccccaagtggatttgcacaacccttgccagagaagttcatcattcgcaaggtcctgccaaacacatgaagccaagcaaaggtcagttgcattcaggtaggacaagatggtaaagcttagctcaggaggcaacatttccaaattaatgaatccttcctgttctttcgatttccttgccttcaaaagatgatatatgtcaatgcctccttggacttgtttacgatgattggtgttagaaatgttgctcgcagccattctcctgctctgctctctggtgaggtagccttgctcactgtagccttcttgttgcag

SEQ ID NO: 1070 - DNA, 140 bp, Homo sapiens
ggggtttggtttgctttggtttatattttttcagttgtttgtttttgcttgttatattaagcagaaatcctgcaatgaaaggtactatatttgctagactctagacaagatattgtacataaaagaatttttttgtcttt

SEQ ID NO: 1071 - DNA, 366 bp, Homo sapiens
ctgaaacaaattatggatcaattacgaaatctcatctgggatataaatgccatgttggcaatgaggaactaagctgatatttaaatttcctgctttacacatgttataccattgttttttccctcaagtattttttccctgtgaagaagattatttatctgcttttattttagtcactaaaactaaagtttttatttttacattgtgatttttacattaaaatattaactttttttaatgctattttatgaaagattattgtaataaactttgatggggtttgtattttggttaatcttcatgaattgaataattgtttttttaaagcaaaataaagttttttaaataaatggaaaaaaaaaaaaa

SEQ ID NO: 1072 - DNA, 704 bp, Homo sapiens
  misc_feature 395, 415, 422, 432, 494, 504, 512, 516, 520, 549, 552, 562,581, 595, 599, 603, 618, 625, 636, 637, 640, 646, 650, 654,675, 678, 680, 695: n = A,T,C or G
cagaattctagaaatttggcagacagtggaagcctttaattgaacttactccttcgttgactgaaaggagttttaaattctgagctcctgagatactgactagcaaccatggaatgaatgtgtgaccagaaagtggctttgacaccaagtgctactgtccctttgtaattggcttctaacagattcaaccagaaataattgataatgtgaatttttgttaattgttcacttgtaggaaaatagaacatgtatcaccctttgttaggtagacatgaacttttcctgcataaagccttgcttttagagaatgcccaataaggcaagaaaaagcatagtaacttgtgctttgagagctcaatatttgtatcttatcagtacagaagaaatatttctgngtaacttgatcttctgctangacttgncttatagggnaccaacactgaaaacttttgtagtgatgactaccaaagaaaatccttgtaaaacaccctttntttccaattngtaaaaanccancccntggtgcttgttcatgaattccttctcaanaancctttggaanaaaattaagggggttctangggttttggggaantttnggtngggtttttcttttgntttttangggtttttttnnttntttaantttngaanaaaaaataacccaaaaacttnggngnggaccccttaagggngaattcccc

SEQ ID NO: 1073 - DNA, 628 bp, Homo sapiens
  misc_feature 417, 419, 439, 483, 515, 518, 520, 548, 554, 572, 584, 590,591, 600, 611, 623: n = A,T,C or G
aaattttagaaaacctgtataaattactggtgcataacttaaagattattctgcctttggctaattgagtaattcccctccagcactagagaccgctcagtgctcttactagatgaactcagtaacgccttgagctgggttgattgaggatgtgtgaaaagctcacagagcccgatgcctgctgctatttcacggcaatgagcctttttctttctacactgaagattttcttcttatttaatgtggtttattttgggctcagaaataattgctctgttgaaaataatcctttgtcagaaaagaaggtagctaccacatcattttgaaaggaccatgagcaactataagcaaagccataagaagtggtttgatcgatatattaggggtagctcttgattttgttaacattaaaataangngacttttcccctgcttttangaataaaatcaaagatacttctatattttatcctatagacatantattataaatgtagtgagtctgctgggactcntgngnaagaacctgaatatagatatagaaacantatttntaactggtgcggatcaanagactaatatanaacttnnttggaaatnactcttttaancttttttgaacngggga

SEQ ID NO: 1074 - DNA, 162 bp, Homo sapiens; identical to SEQ ID NO: 970

SEQ ID NO: 1075 - DNA, 157 bp, Homo sapiens
ctgcaaaccagggaggaaaatcatctggcccctgctctgaggacagacatgtgctaccaggcccactggcctggacctgaaaggccagccacgcccccgcttggccctgaggtgcatggggtgtggcacacaccctaacctgtgctattcaccttgg

SEQ ID NO: 1076 - DNA, 293 bp, Homo sapiens
aaatgtaggtggcgtatgtgttcgtgttttaatgtattcagagccattgggcaataagcagtccagaacattgaaaactcaagcaggtaaagcacctaacacccttagtttctagaattactttaaaaaacttttatattgctgcatcttccacagttctttgggtagtctctgaacttaaaatttgtaggagttgtagactacctaaatttttaagttatggtatttgttcataggttgtaggggtaggtaaagaaggaaacagacaagaaaatggcttcttgaggtggcag

SEQ ID NO: 1077 - DNA, 587 bp, Homo sapiens
  misc_feature 5, 427, 445, 468, 494, 532, 550, 561, 565, 570, 572, 579: n = A,T,C or G
aaagntattttagtcatgaaattttatatgcagagagaaaaagttaccgagacagaaaacaaatctaagggaaaggaatattatgggattaagctgagcaagcaattctggtggaaagtcaaacctgtcagtgctccacaccagggctgtggtcctcccagacatgcataggaatggccacaggtttacactgccttcccagcaattataagcacaccagattcagggagactgaccaccaagggatagtgtaaaaggacattttcccagggctaccttatcaaggacggcaagctgatcaagaacaatgcctccactgactatgacctatctgacaagagcatcaaccctctgggtggctttgtccactatggtgaagtgaccaatgactttgtcatgctgaaaaggctgtgtggtgggaaccaanaagcgggtgctcaccctncgcaagtccttgtggtgcagacnaagcggcaggctctggaaaaaatgancttagttcttgaacccctccagttgactgccggcggcntcaaaggcaatcaccacntgcgcgtctanggancactngncactggnatatgcta

SEQ ID NO: 1078 - DNA, 377 bp, Homo sapiens
ccaggagatagagcacaataggagagatgctgaggaacttgcgggaagaggtaaactggagcccatagtccatttgctcccagtgtgtcagtagccgagcctttccttggtcaggagtctcaaagggtgtccctttcaccgtatgaaggaagacatacgtagccaggttatggatgacgttggtcagggtccagacaacaggaatgctgaagaaggggatgctgagtagaaccatatgcagcaatcctaccaagatgatgtaggccagccagatgcctcggctattcatcactcgggtgttggggtttacttcgctgtgtgccacccccacattcatcctgccagctcagatccccgtccggctatgggcgcggcgc

SEQ ID NO: 1079 - DNA, 312 bp, Homo sapiens
atcagacaaggcaaagcgaaattggtcattctcgctaacaactgcccagctttgaggaaatctgaaatagagtactatgctatgttggctaaaactggtgtccatcactacagtggcaataatattgaactgggcacagcatgcggaaaatactacagagtgtgcacactggctatcattgatccaggtgactctgacatcattagaagcatgccagaacagactggtgaaaagtaaaccttttcacctacaaaatttcacctgcaaaccttaaacctgcaaaattttcctttaataaaatttgcttgtttt

SEQ ID NO: 1080 - DNA, 307 bp, Homo sapiens
aaacttgatccaacctctttgcatcttacaaagttaaacagctaaaagaagtaaaataagaaggcaatgcttgtggaatgtacagtgcatattggcggcgcacgcctcattacgattcgcctgcttgcttctcctgttcaatcgtttctttggaaggcagtggatttttctcttgcgtctctgtcttcttcagtttcgacttatcgaatttctcgatctcagccatatcgggtttgtcagacatggttgcggaggaaaagcgaagcgaggcgcacgagtacgagcgaagtctggtctgcgcagtggc

SEQ ID NO: 1081 - DNA, 317 bp, Homo sapiens
aaaaacaaaaacccttaacggaactgccttaaaaaggcagacgtcctagtgcctgtcatgttatattaaacatacatacacacaatctttttgcttattataatacagacttaaatgtacaaagatgttttccacttttttcaatttttaaacacaacagctataaacctgaacacatatgctatcatcatgccataagactaaaacaattatatttagcgacaagtagaaaggattaaatagtcaaatacaagaatgaaaaacgcagtacatagtgtcgcgaactcaaatcggcatttagatagatccagtggttt

SEQ ID NO: 1082 - DNA, 422 bp, Homo sapiens
  misc_feature 346, 361, 381, 389: n = A,T,C or G
gggcggcggcgcggttttttatggtgacacaaatgtatattttgctaacagcaattccaggctcagtattgtgaccgcggagccacaggggaccccacgcacattccgttgccttacccgatggcttgtgacgcggagagaaccgattaaaaccgtttgagaaactcctcccttgtctagccctgtgttcgctgtggacgctgtagaggcaggttggctgtggcgagtccgtcctttctttattctggcaggctttggtttggggatgtactgattatttgcctggtactcgagttctttacggaagtagtgaattgctttgtttacctgcccgggcggccgctcnaaagggcgaattcancacactttggcgcgtactantggatccnactcggaccaacttgcgtaatcatggcatactg

SEQ ID NO: 1083 - DNA, 162 bp, Homo sapiens
ctgctgcattagccttcaaaagtatttggaaacttaagatgaactacatttcttgcaaagtacattcctttctgtggtattttgtcctgtaactgaagtatagtaattattttatggaaatgttagcaattctgtaccaactttgaataaaatgaaaaattt

SEQ ID NO: 1084 - DNA, 579 bp, Homo sapiens
  misc_feature 427, 454, 457, 481, 534, 539, 548, 551, 555, 558: n = A,T,C or G
aaagttattttagtcatgaaattttatatgcagagagaaaaagttaccgagacagaaaacaaatctaagggaaaggaatattatgggattaagctgagcaagcaattctggtggaaagtcaaacctgtcagtgctccacaccagggctgtggtcctcccagacatgcataggaatggccacaggtttacactgccttcccagcaattataagcacaccagattcagggagactgaccaccaagggatagtgtaaaaggacgttttcccagggctaccttatcaaggacggcaagctgatcaagaacaatgcctccactgactatgacctatctgacaagagcatcaaccctctgggtgggctttgtccactatggtgaagtgaccaatgactttgtcatgctgaaaggctgtgtggtgggaaccaanaaccggtgctcccctcccaagtccttntgngcaacaaacgcgggctctgagaanatgaccttagttcttgccccctcaattgactgcccggcgcgtcaggcaatcanccttnggcgtctangancacncgncacttgcgatatgctatgttt

SEQ ID NO: 1085 - DNA, 334 bp, Homo sapiens
aaaacttctccaatacattaaaactttttttctcgccacatagcacttctttcttgcctctttcatttctgctcctggtgttgcctgcctcctgcaagacccagatgaagaaaccttttcaatggtcgagatctgagacttggagctggaggggctgaaggcttgaaggaaggtggttactggtcaaaaggagaagttcatttgcacaaaaatataaactggggaggatgagaccagcacatacacgtatggattgatctacaatccatataaaaaaatagacccaaattgtcattttacatttgcaatattatacaaaataatatatattttt

SEQ ID NO: 1086 - DNA, 235 bp, Homo sapiens
aaagctggctcaagactggcccaggcataatactgtcaatctaaaggtaaccggcaacatcaaaaagtacatctcaaaagaatcaggcttaaagataaacaggagaactggaaatatctaagagtaagaagtgtaaacaatagaaaagaggtagggtttagggttctcatcttgggatttccccaggtcttcaagcttctatccttcctgggttctgggtcatgggcctccagat

SEQ ID NO: 1087 - DNA, 229 bp, Homo sapiens
gacaaagaagcgaaaagtagatggtttgagcacagaggcagagcagcccttcattccggtagaggtgctcgtagacctgttcctcaaggaaggtgcctgtgatgaattgttctcctacctcattgagaaagtgaagcgaaagaaaaatgtactacgcctgtgctgtaagaagctgaagatttttgcaatgcccatgcaggatatcaagatgatcctgaaaatggtgcag

SEQ ID NO: 1088 - DNA, 334 bp, Homo sapiens
  misc_feature 16: n = A,T,C or G
ccattacaaagacacnggaatatgttaagaagtgaggggcaggatgaaatcatctagggtaggtatttagagggagggcgccgtgcaaaataaaatcctcactatgaaacaaaggcggaggcaggaggctgcgttaggtggaagcagcggaggaaggagacgaaagggattgtcattttcatgtcgtggctttttagaagacagccatgtcctctactctgattctatcaaaatgtgttctcggggtgctggtaacgttcagccaacgaaataattcctatggcggcagtaggaataacaaaacgcggaagcgggaacgatgtctttttattcc

SEQ ID NO: 1089 - DNA, 573 bp, Homo sapiens
  misc_feature 425, 434, 449, 473, 475, 512, 525, 537, 549, 556: n = A,T,C or G
ccagagcaggagggagacagaggggaggcaccacacactttgaagcaaccagatgtgatgaggactcaatatcaggagaacagcactgagcgggtggtgctaaaccgtttgtgaggactctgccccataatcccatcgcctcccaccagggggcttacatttcaacatgagactcggtgaggacacagatccaaaccacatcaatagtgctttcatgcttttgattatcttttgtaactatgttattgaactataatttacataccatacaattcaccaacgtaaagtgtgtaattcaatggtcttaagcatattcagagttgtgtgaccatcgctacagtcaattttaggacatttttatcactgcaaaagaaagacctcaatcttcccattccttccatcccgaaacaaccctaatctacttnctctatatnggagaatttgcttanttctggacattttaccttgccccngngggccgcttcaaagggcgaaattccaccacactttgnggccggtacttantggatcccaacntcggtacccaancttgggngtaaatcatgggcatta

SEQ ID NO: 1090 - DNA, 290 bp, Homo sapiens
cccagaccaggaattcggcttcgacgttggccctgtctgcttcctgtaaactccctccatcccaacctggctccctcccacccaaccaactttccccccaacccggaaacagacaagcaacccaaactgaaccccctcaaaagccaaaaaatgggagacaatttcacatggactttggaaaatatttttttcctttgcatttatctctcaaacttagtttttatctttgaccaaccgaacatgaccaaaaaccaaaagtgcattcaaccttacaaaaaaaaaaaaaaaaa

SEQ ID NO: 1091 - DNA, 282 bp, Homo sapiens
ccacatcggcagggtcggagccctggccgccatactcgaactggaatccatcggtcatgctctcgccgaaccagacatgcctcttgtccttggggttcttgctgatgtaccagttcttctgggccacactgggctgagtggggtacacgcaggtctcaccagtctccatgttgcagaagactttgatggcatccaggttgcagccttggttggggtcaatccagtactctccactcttccagtcagagtggcacatcttgaggtcacggcaggtgcgggcgg

SEQ ID NO: 1092 - DNA, 249 bp, Homo sapiens
ccaagttaatgaggtcacggccagagcggtggagaactcgactgcatagactagaccatccggaccaacgatgccagagacatgggagaccgtggtgcccgaggcagccccgaggtagagaaccttagcccccggtttgatgtggatctggtccacaccacccaggattgctgctgctagcttggagcggaaggggttccaggctcggtactcaattttgtcatctccttccgaaatcgagactctctt

SEQ ID NO: 1093 - DNA, 426 bp, Homo sapiens
  misc_feature 276, 297, 311, 350, 357, 361, 363, 367, 386, 413, 418: n = A,T,C or G
aaaaataagaaaatacataagaccataacagccaacaggtggcaggaccaggactatagcccaggtcctctgatacccagagcattacgtgagccaggtaatgagggactggaaccagggagaccgagcgctttctggaaaagaggagtttcgaggtagagtttgaaggaggtgagggatgtgaattgcctgcagagagaagcctgttttgttggaaggtttggtgtgtggagatgcagaggtaaaagtgtgagcagtgagttacagcgagaggcngagaaagatagacatgagggnaagggccatgcttnaagggaccttgaatgggtaaagaagtttgatatttaagnagttaanaatntntatntctccaaaagaggctggtnctttgggaccttcggttcttaccaccnttaanggcgaatt

SEQ ID NO: 1094 - DNA, 211 bp, Homo sapiens
aaacattgtctaagaaaatatgatctatgaagacattaatacattaataagatacttaagagttcattataagctacaacactttgcaaataagtatccagtttaattgtaacaaaccacaatttgtgagcaaatttaagaatataaaaaacattaattagttaaatacaattctctgggaatatacattatacctacagacctgcccggg

SEQ ID NO: 1095 - DNA, 437 bp, Homo sapiens
aaacatctcacatatacaaaataggtacaatttaatttttctgcttgcccaagaaacaaagcttctgtggaaccatggaagaagatgaaaatgagactggcaaagaacaaatgctgaatctgaagaagaggacaactttgggcaaataatctgcatacttttaattgggaataagatggaaaatatgaatgctaaatcaaattttttaaaaaatacaccacacgatacaactcaatacaggagtatttcttctcaaattcttctagcaccatcaacattcttcaagtatctgaaatactattaattagcacctttgtattatgaacaaaacaaaacaaggacctcagttcatctctgtctaggtcagcacctaacaatgtggatcacactcatggggaaagtgttttgaggtagtttacctcggcccgcgacccacg

SEQ ID NO: 1096 - DNA, 237 bp, Homo sapiens
caggtctttctttatataatcgtttgcattttgttacttgctaccctgagtactttcaggaagactgacttaaatattcggggtgagtaagtagttgggtataagatctgaacttttcatctgcagaggcaagaaaaatatttgacattgtgacttgactgtggaagatgatggttgcatgtttctagtttgtatatgtttccatctttgtgataagatgatttaataaatctcttt

SEQ ID NO: 1097 - DNA, 297 bp, Homo sapiens; identical to SEQ ID NO: 745

SEQ ID NO: 1098 - DNA, 543 bp, Homo sapiens
  misc_feature 349, 428, 492, 513, 532: n = A,T,C or G
ccaattgaaacaaacagttctgagaccgttcttccaccactgattaagagtggggtggcaggtattagggataatattcatttagccttctgagctttctgggcagacttggtgaccttgccagctccagcagccttcttgtccactgctttgatgacacccaccgcaactgtctgtctcatatcacgaacagcaaagcgacccaaaggtggatagtctgagaagctctcaacacacatgggcttgccaggaaccatatcaacaatggcagcatcaccagacttcaagaatttagggccatcttccagctttttaccagaacggcgatcaatcttttccttcagctcancaaacttgcatgcaatgtgagccgtgtggcaatccaatacagggggcatagccggcgcttatttggcctggatggttangataatcacctgacagtgaaccagactcggccgcgacccgctaagggcgaattccacacacttngcggccgttcttatggatccnactcggaccaacttggcgnaatatggcata

SEQ ID NO: 1099 - DNA, 142 bp, Homo sapiens
gcagaggctacgccgtctgcaggacaggtccctcgcccagcccatcaccactgaagaggtggtcatcgcggccacattgcaggccccctccacatcccgcttcgcctcccttcaggactccaccccggctcccggacgccag

SEQ ID NO: 1100 - DNA, 697 bp, Homo sapiens
  misc_feature 542, 568, 574, 595, 620, 636, 652, 676: n = A,T,C or G
aaaatgtagcaaagagtcatttactactctcagaagtggcacatacatggcatagaaaacaatctatagtcagttaactattaaaacagaaacttgaaatttaagtgacaaacatttgtagcactccctaaagaaataggaaataaaaatgcatttatccatatgaacttgattattctgaattactgactataaaaaggctattgtgaaagatatcacactttgaaacagcaaatgaattttcaattttacatttaattataagaccacaataaaaagttgaacatgcgcatatctatgcatttcacagaagattagtaaaactgatggcaacttcagaattatttcatgaagggtacaaacagtctttaccacaattttcccatggtcttatccttcaaaataaaattccacacactatcaaactaaatcaagatttgctagtggataaaattaccataaatatcccgtactctctctgaaacagctacaaacatcttggtttttgcaaaaatatacaatggtttctcaatctttctggnccttatctcaatttggcaaaaaatanttttgnaaacaaatcttccttttaaanggtaattcttggtaaaagaagggcnaaatctttttaaaatnccccatgcttaaaatnttgaccttgcccggggcgggccgntttaaagggggaaattccaaa

SEQ ID NO: 1101 - DNA, 477 bp, Homo sapiens
  misc_feature 372, 397, 405, 419, 445: n = A,T,C or G
aaatctcagacctgggaaatggactatacacagccttctaggggagaagagaaatgccttagatgttctgacagcactgcacctttggcttgttttcagtggttggtggaacatgaataggaaccacattgttgcttggagacatgtcattttcgcgtctgtctgacatttgcttctgagaaacaatgcggtaaatctctgttaaaattgtctgaaaagcagcttctacatttgtagagtctagggccgaagtttcaatgaatgacaaaccattcttttctgcaaaagctcttgcttcatctgtaggaactgccctgagatgacgtagatcactcttattgcccacaagcatgacaacaatgttactatcancatgatctctcacctgccgggcggncgtcgaanggcgaattccaccnacttgccggccgtactaatggatccnactcggaccaaccttggcgtaatcatggcata

SEQ ID NO: 1102 - DNA, 229 bp, Homo sapiens
  misc_feature 210, 222, 226: n = A,T,C or G
gtttaatgtgttgtaagacgtagagtttatctcaagctgttaaaaatggtaatgtacaaatgtgaatagacacttatctatataatatgggtaagttttgtttcgcctataatagatgtttataaaaacaagtgaggggacagttggtctttttatcttttctttctttttctttcttttctttttttcttttttttttttttttttggncccccccgggtncccnttt

SEQ ID NO: 1103 - DNA, 185 bp, Homo sapiens
aaactactgaactgttacctaggttaacaaccctgttgagtatttgctgtttgtccagttcaggaatttttgttttgttttgtctatatgtgcggcttttcagaggaaatttaatcagtgtgacagaaaaaaaaatgttttatggtagcttttactttttatgaaaaaaaaattatttgcctttt

SEQ ID NO: 1104 - DNA, 258 bp, Homo sapiens
aaaacaggcacaagtgcaaacaattcacaaaaatttctagggaagatgcttttgttttgaaaactctgacccttaaaaaaaagtccttgcaatttctttgcccccaggtaggtcactagggagcagaagaatctaaaaatattatctagatagaaagggtccagacacctgaagttctttcctggaattccatctcacagcagccctgaagtggggcagggccgaggaggacaaggagacagcagtctgtggaggcag

SEQ ID NO: 1105 - DNA, 207 bp, Homo sapiens
aaacatctcacatatacaaaataggtacaatttaatttttctgcttgcccaagaaacaaagcttctgtggaaccatggaagaagatgaaaatgagactggcaaagaacaaatgctgaatctgaagaagaggacaactttgggcaaataatctgcatacttttaattgggaataagatggaaaatatgaatgctaaatcaaatttttt

SEQ ID NO: 1106 - DNA, 514 bp, Homo sapiens
  misc_feature 453, 459, 464, 470, 490, 495, 502: n = A,T,C or G
ccacccgttctgctggcctggatctccccactctaggggtcaggctccattaggatttgccccttcccatctcttcctacccaaccactcaaattaatctttctttacctgagaccagttgggagcactggagtgcagggaggagaggggaagggccagtctgggctgccgggttctagtctcctttgcactgagggccacactattaccatgagaagagggcctgtgggagcctgcaaactcactgctcaagaagacatggagacccctgccctgttgtgtatagatgcaagatatttatatatatttttggttgcaatattaaatacagacactaagttatagtatatctggacaagccaacttgtaaatacaccacctcactcctgttacttacctaaacagatataaatggctggtttttagaaacataaaaaaaaaaaaaaaaacttnggccgnaaccnccttanggggaaatccacccactggnggccnttactangggatccaactt

SEQ ID NO: 1107 - DNA, 346 bp, Homo sapiens
ctcgaatccccctagggctcaggcactgagggcctggggacagtggagcatatgggtgggagacagatggagggtaccctatttacaactgagtcagccaagccactgatgggaatatacagatttaggtgctaaaccgtttattttccacggatgagtcacaatctgaagaatcaaacttccatcctgaaaatctatatgtttcaaaaccacttgccatcctgttagattgccagttcctgggaccaggcctcagactgtgaagtatatatcctccagcattcagtccagggggagccacggaaaccatgttcttgcttaagccattaaagtcagagatggaaaa

SEQ ID NO: 1108 - DNA, 215 bp, Homo sapiens
  misc_feature 188, 199, 205, 209: n = A,T,C or G
ctgtggaggagggtttcagaggagagaggtcggagagcagaggcctgagaagccagaggcaggtggagagagggtggaaagtgagcagcgggctgggctggagccgcacacgctctcctcccatgttaaatagcacctttagaaaaattcacaagtccccatccacaaaaaaaaaaaaaaaaaaaaanttttcggggantaaaantaanttttaa

SEQ ID NO: 1109 - DNA, 273 bp, Homo sapiens
aagcaagatgggtaagggctcaggaagttgctccaagaacagtagctgatgaagctgcccagaagtgccttggctccagccctgtaccccttggtactgcctctgaacactctggtttccccacccaactgcggctaagtctctttttcccttggatcagccaagcgaaacttggagctttgacaaggaactttcctaagaaaccgctgataaccaggacaaaacacaaccaagggtacacgcaggcatgcacgggtttcctgcccagcgacg

SEQ ID NO: 1110 - DNA, 304 bp, Homo sapiens
ccaagcacttcaaacctcatgggttctccagcgacaaggctaaggcgggctcctccgaatggctggctgtggatgggttggtcagtccctccaacaacagcaaggaggatgccttctccgggacagattggatgttggagaaaatggatttgaaggagttcgacttggatgccctgttgggtatagatgacctggaaaccatgccagatgaccttctgaccacgttggatgacacttgtgatctctttgcccccctagtccaggagactaataagcagcccccccagacggtgaacccaattgg

SEQ ID NO: 1111 - DNA, 104 bp, Homo sapiens
ctgcttctgcatttctcttcctaaatttcattgtgttgatttctttccttcccaataggtgatcttaattactttcagaatattttcaaaatagatatattttt

SEQ ID NO: 1112 - DNA, 374 bp, Homo sapiens
ctggcatgaagaaggaatagagcatggacacgccctgggacagcatggtgatctctaatttgtgctctgtcttaaaatagtcgaggaactgtttgagggtcatctcctcaccattaggctgcagcccttgtacctcaaagcgatcccacaatgtccactcttggttatagtactggtgacgtggtgcggcaaggggttcagagaaaccaaagaaaggcagggccaagttgaggaaaccattcttgtaggagtcaagctgtcggtgcccctgcacaaccttgtacagctccagacacacaaggccaaccacggctgctgtggtcgtggcaatggctgggatgatcttccctgcaatcagcttgctcttgtgcccg

SEQ ID NO: 1113 - DNA, 143 bp, Homo sapiens
  misc_feature 133, 135: n = A,T,C or G
ctggcacctgcctcccaggccattctgacgtgtaaccgcatataggagcccactggctgagtagctaccatcatcgctggtggggaaactggtggtaggggtgtgagggtaagtgggggtgtcagcccgccangnggtcggaa

SEQ ID NO: 1114 - DNA, 335 bp, Homo sapiens
aaaagtccaacaactttttaatataaattacgactctcaaacccattcccatcactttattagtgatggtagcatacatattagagaaggtagctaaaggcaagagagcaccaaaggaaaaagactgtccaaagaacaggtattagaatgaggccgaagatcacggtgaccagagatttctaggagtctctaacctttccaccctatcctgttaaccctttagatctctagtataacactcaggctactgaggtattttagagcaacaagctgggttactttcagagcaaccagcttgactggaactgagagtaaattgggaatgtatgaccaat

SEQ ID NO: 1115 - DNA, 478 bp, Homo sapiens
  misc_feature 421, 422, 452, 467: n = A,T,C or G
gactacctttggcccctgattcaagagaagattaaagttctggcagaagccgggctttctgagaccaatttttcagaaatgacagaatccactgattacctctacaaggacccaaagcagcagaagatctacgacctattccagaagtcctttgagaaagaaggaagtgatatggagctcctggaagcagcagagtcctttgacccaggaagtgcttcaggaacatctggaagtagttcccagaacatgggagacaccctggatgaaagctcattgacagccagtccacagaagaaaaggagatttgaattttttgataactgggacagctttcgtctccctgtaaaaggggcaaaaagaaaaaaataaaaaagcatttaccttgcccggcagccgctcaaggcgaattcagcacacttgnngccgtactagtggatccgacctgggaccancttggcggaaacatnggcataactgg

SEQ ID NO: 1116 - DNA, 563 bp, Homo sapiens
  misc_feature 476, 499, 520, 533, 557: n = A,T,C or G
cgaggtaaaacaatttacctcagaattccaagttgaagttcccaaagtatattaaaaacttctcaaatcattaatttgaatcagatgttccaaatcaaaggaattaaatactctttttctgggccaattgataaatctgaaactattttgaaatagtattaagtgacagaaaagcaaaaatatatctttgccttgtcttgatattttagcatgtacatttttggtccaaggctggaatatacaattagaaataaaagccttcttcatcataaagcttaggatataaattattctgaggaatgaattccctaattacttttagttaattccagtgaaataagcaaacagccttggatattgaaaactgttctaaagtgtggtaataatcttctaagaatagcaaacataacagaattaactgagtatctgatgcctgagtattttgctgtgcctgacaatcattatttacctgcccnggcgggcgctcaagggcgaaatncaacacactttgcggccgttnctagtggaatccnaactcggtaccaaaccttgggggnaatcat

SEQ ID NO: 1117 - DNA, 324 bp, Homo sapiens
aaatttcttaatatgagaaaacaacaaggtaggttaggttcgtataacaaacaatacacgctctataaagtctcaggaatacccaaatgtgttctggtttggatatgaaagagggaccacttctagctggtgttggtaagcaagccaatgaggtgtgcagcaaacaaaacctgtcactaaaaacaactcaacaggccattatgagtatgagcccatcacagccaaaatcctcaactgtgaccggcaggaccagcaagggggggtgttgaaggggttatgaacagcaaccataaagaaaggaatctccaacagaagggacaatgg

SEQ ID NO: 1118 - DNA, 214 bp, Homo sapiens
tcttggggtctgtttctggtattttacaaaattgctaagtggaatgcatgaattgcattatgttctctggtaacacgtagagttcagacccttctgaactctgttgataataccacaccatgttctggacccatagctctggcatcctcaggggttgtgatccagctccatatattgtttaccttcaaagatacaattaaatggcttgattttt

SEQ ID NO: 1119 - DNA, 354 bp, Homo sapiens
aaaaaactgaccttcccttaaggcctggtcatagaagtgtaaacaatgtaaatgaatccaccattaccagttgtcatatcatatctatgtcacctgtgtattctgagattacacacatacctgccaatatacctgggaaaggttattttatcacagttacacttgagttcttggcaggcaggactgaggaagagtaatttgaaagaagctttacatcctatttagaagaaatcactagtatttccttaaataacaggttacaatagaaagatactgcctggaagttatcctttcactttggttcatttttagtttttctttatgatttacatagctgtttaattcatttgctta

SEQ ID NO: 1120 - DNA, 123 bp, Homo sapiens
aaaactcgaggactgtatttgtgactaattgtataacaggttattttagtttctgttctgtggaaagtgtaaagcattccaacaaagggttttaatgtagatttttttttttttgccccccat

SEQ ID NO: 1121 - DNA, 433 bp, Homo sapiens
  misc_feature 235, 346, 358, 363, 369, 390, 403, 406, 415: n = A,T,C or G
cctcgagggagattgccagcaccctgatggagagtgagatgatggagatcttgtcagtgctagctaagggtgaccacagccctgtcacaagggctgctgcagcctgcctggacaaagcagtggaatatgggcttatccaacccaaccaagatggagagtgagggggttgtccctgggcccaaggctcatgcacacgctacctattgtggcacgggagagtaaggacggaagcggntttggctggtggtggctggcatgcccaatactcttgcccatcctcgcttgctgccctaggatgtcctcttgttctgagtcagcgggccacgttcaatcacacagcccttgnttggacctcggnccgcnaccacncttaaggggcgaaatttccancacacttggcggncgnttcttaagnggaatcccaaacttcggg

SEQ ID NO: 1122 - DNA, 576 bp, Homo sapiens
  misc_feature 454, 480, 488, 489, 547, 555, 564, 569: n = A,T,C or G
aaatgttttacttctttgataaagcagagtacaatagaaaaaaaacaattagtttccagtaatatctatatctctaatcagaattaagtcttccaagacatattacctggaaataaaagcctgttacaataagcaaagcttcaaccagagcggctacttttcgtgccaggaaaaagttcatccctataggaggaatgatgtgctatgtaaaatggctgtaaggtcacagccttgagggcattggaagtatattatcctattccacattaagtatttcagcgaatttcaaacatcagtttatctgcaaccatgctggcaacctttactgatatttcaatcaaccgggaaaaaataaattaaagaaatcccttcacggatattcccgtgatttacactgttaaaaggtgcactgttcattaacatgtaattctggtcagaattacctttgagactncttgtcaaaatttggttaacagtaanaatcttcnnaaattcagttcttataatcaataatttgtcagcttaggatcccctgcccggcggcctncaaagggnaaattcccnccttnggggcgt

SEQ ID NO: 1123 - DNA, 371 bp, Homo sapiens
  misc_feature 295, 304, 320, 328, 335: n = A,T,C or G
gaaagaagtccctaagtgtggatttctccctgggaatgagaaagtcctgtccctgcttgccctggttaagccagaagtctggactctcaaagagaaatgcattctggtgattacatggatccaacacctgatccccaagattgaagatggaaatgattttggggtagcaatccaggagaaggtgctggagagggtgaatgccgtcaagaccaaagtggaagctttccagacaaccatttccaagtacttctcagaacgtgggatgctgtggacctgcccgcgcggccgctcaaanggcgaattncagcacacttggcggnccgtctantgggatnccaactcggtccaagcttggcgtaatcatgggcata

SEQ ID NO: 1124 - DNA, 264 bp, Homo sapiens
aaaaaaaaatgtggaggaaagtagaaatttaccaaggttgttggcccagggcgttaaattcacagatttttttaacgagaaaaacacacagaagaagctacctcaggtgtttttacctcagcaccttgctcttgtgtttcccttagagattttgtaaagctgatagttggagcatttttttatttttttaataaaaatgagttggaaaaaaaataagatatcaactgccagcctggagaaggtgacagtccaagtgtgcaacag

SEQ ID NO: 1125 - DNA, 214 bp, Homo sapiens
ttttcagagctagctgaggttttattttggaccaaaaaaaagcaattgaattgttttgtagctggaggcatgggcaaggggggtccccaggtagtaaactccccaggtgggctgagggctagggctgagcctcaggtgggtctcctgttcccagtgctaccctgcatagcggcctccttcccaggctctggggcagcgcaggaggggtaggctg

SEQ ID NO: 1126 - DNA, 119 bp, Homo sapiens
gggaaaagtaactcgggcccatggaaacagtggcatggttcgtgccaaattccgaagcaatcttcctgctaaggccattggacacagaatccgagtgatgctgtacccctcaaggattt

SEQ ID NO: 1127 - DNA, 214 bp, Homo sapiens
  misc_feature 10, 70, 148, 158, 159, 165, 201, 203: n = A,T,C or G
tgcccgtgcnggtgccattgccccatgtgaagtcactgtgccagcccaaaacactggtctcgggcccganaagacctcctttttccaggctttaggtatcaccactaaaatctccaggggcaccattgaaatcctgagtgatgtgcanaccttggcgnnaccacnctaagggcgaatttcaacacactggggggcgtactngnggataccaaat

SEQ ID NO: 1128 - DNA, 591 bp, Homo sapiens
  misc_feature 4, 5, 15, 26, 37, 38, 45, 62, 97, 121, 125, 309, 335, 364,447, 468, 519, 538, 544, 549, 551, 562, 580, 583: n = A,T,C or G
tganntcagacccgnggatcctctanagtcacctgcnngcatgcnatgcttgaagcggccgncagtgtgatggatatctgcagaattcgcccttagnggggtcgcggccgaggtgtacggnctgnggtacaagcagactctgaagatgatcagacaaggcaaagcgaaattggtcattctcgctaacaactgcccagctttgaggaaatctgaaatagagtattatgctatgttggctaaaactggtgtccatcactacagtggcaataatattgaactgggcacagcatgcggaaaatactacagagngtgcacactggctatcattgatccangtgactctgacatcattagaagcatccanaacagactggtgaaaagtaaaccttttcacctacaaaattcacctgcaaaccttaaacctgcaaaattttcctttaataaaantttgcttgttttacctgcccnggcgggcccccgggcagggtgttttgttaaaaaaaaattctgacaaatcanaaaatggggggtcaaggantggtgntgatncnaaaaatggaanccattgggtgggggcttntcnggggtgcc

SEQ ID NO: 1129 - DNA, 287 bp, Homo sapiens
aaaaagattgtgtgtatgtatgtttaatataacatgacaggcactaggacgtctgcctttttaaggcagttccgttaagggtttttgtttttaaacttttttttgccatccatcctgtgcaatatgccgtgtagaatatttgtcttaaaattcaaggccacaaaaacaatgtttgggggaaaaaaaagaaaaaatcatgccagctaatcatgtcaagttcactgcctgtcagattgttgatatataccttctgtaaataactttttttgagaaggaaataaaatcag

SEQ ID NO: 1130 - DNA, 131 bp, Homo sapiens
caggtccacagctaacatcattgcagcacctttactccttcggctgtgatccaatctccagctcacttctttttgccagcaccaacattggcctttgcagtccccctgactttcttcattctgttcttgcg

SEQ ID NO: 1131 - DNA, 576 bp, Homo sapiens
  misc_feature 400, 438, 484, 532, 556, 564: n = A,T,C or G
aaacatgcaaaataactgacaataatgttgcacttgtttactaaagatataagttgttccatgggtgtacacgtagacagacacacatacacccaaattattgcattaagaatcctggagcagaccatagctgaagctgttattttcagtcaggaagactacctgtcatgaaggtataaaataatttagaagtgaatgtttttctgtaccatctatgtgcaattatactctaaattccactacactacattaaagtaaatggacattccagaatatagatgtgattatagtcttaaactaattattattaaaccaatgattgctgaaaatcagtgatgcatttgttatagagtataactcatcgtttacagtatgttttagttggcagtatcatacctanatggtgaataacatattcccagtaaatttatatagcantgaagaattcatgccttctggtggacatttataagtgcattttatntacaataaaaatttttcttttagaaaaaaacctcggcgggacccctangggaatcaacccttgggcgtctanggacactnggccactgggaa

SEQ ID NO: 1132 - DNA, 386 bp, Homo sapiens
aaattttatttcaaaagcttggatagcttcaatatccaggttgtggcaaaatcaggacacgtgtaaaataccttacaatacattagatccccaaaaggtaccaaaaagtacagtaaaattaacacttccgttacaggaaatgtatgacgcaaataatataaaattaaaaggtgaaaaaaaggtgacactggtttcctaagatacaatttactctttacaaccagggtccacaggtccaggctgcagagcggcagcaggaagcagagcctcccacctgcttctgggggacctggtaataaaaatcagcccatgatggcgccatggcctctcagacaccacacgctgcctaaacacctagagctctggaaatagtcaacaggagagtg

SEQ ID NO: 1133 - DNA, 281 bp, Homo sapiens
ggcaggtaaaaagatccaaatgtgactgagatcattccagcctgcactttttatttgtaggcagaaggaacgggataggttgaggggcatgacgggggctctcgccacctcttgtctgcacctctggaacaggtgggagccgaatcattcaagtcctacctggtcagactcccaaccacgctgaggcaggcccttacctggatggcctcatgggcctccctcttgaaaagaccctcactctgtttggaaaagatcccttagcagccataatcaggaaagag

SEQ ID NO: 1134 - DNA, 332 bp, Homo sapiens
ccagtgagcccatcccgttctctgatttgcagcaggtctccaggatagctgcttatgcctacagtgcactttctcagatccgtgtggacgcaaaagaggagctggttgtacagtttgggatcccatgaagagaggggtccttggacagctcttctcctctcttcatcccatctctaccccacccccttggcccccagcctcactgcggcttatacagtaccctaacctgctactaatcacagagaaaaatgtgaagaaggaggagaagaggaaggctagaagcctgagcaagtgagggtagaaccttttgggactggcctttgaagctctgg

SEQ ID NO: 1135 - DNA, 316 bp, Homo sapiens
ctgcccaatgggagaataagcagacctggctcagacatgaatcatgtgcttggtgtactgcagatgccaaactgcatccccacaacccaccacgtagacagcagacagggctggaagttgatttttaatgataaagtacaatgaagggagggcagaggggctaagcctagctgtctggggtgctgtggtggtggtagactggctacacaaactgttgctgctgctgctgcttcttggtggccgccttgctggcgaggtccttggccttctctgtagctgccagtgccgtctcctttgccttctccttggcttcctt

SEQ ID NO: 1136 - DNA, 385 bp, Homo sapiens
  misc_feature 342: n = A,T,C or G
ggatttcaaaatcaacaccgatgagattatgacttcactcaagtctgttaatggacaaatagaaagcctcattagtcctgatggttctcgtaaaaaccccgctagaaactgcagagacctgaaattctgccatcctgaactcaagagtggagaatactgggttgaccctaaccaaggatgcaaattggatgctatcaaggtattctgtaatatggaaactggggaaacatgcataagtgccaatcctttgaatgttccacggaaacactggtggacagattctagtgctgagaagaaacacgtttggtttggagagtccatggatggtggttttcagtttanctacggcaatcctgaacttcctgaagatgtccttgatgtgcag

SEQ ID NO: 1137 - DNA, 229 bp, Homo sapiens
cgcgagcctgagaagaggccccccaccgtggtgtccaatacattcactgccctgatcctctcgccgttgcttctgctcttcgctctgtggatccggattggtgccaatgtctccaacttcacttttgctcctagcacgattatatttcacctgggacatgctgctatgctgggactcatgtatgtctactggactcagctcaacatgttccagaccttgaagtacctgg

SEQ ID NO: 1138 - DNA, 232 bp, Homo sapiens
  misc_feature 9: n = A,T,C or G
aaaacccanacttccaaaggtttaaactacctcaaaacactttcccatgagtgtgatccacattgttaggtgctgacctagacagagatgaactgaggtccttgttttgttttgttcataatacaaaggtgctaattaatagtatttcagatacttgaagaatgttgatggtgctagaagaatttgagaagaaatactcctgtattgagttgtatcgtgtggtgtatttttt

SEQ ID NO: 1139 - DNA, 165 bp, Homo sapiens
cacaatactaatactgtaggaattggtgaggccttgacttaaaactttctttgtactgtgatttccttttgggtgtattttgctaagtgaaacttgttaaattttttgttaactaaatttttttcttaaaataaagactttttcacaatgagaaaaaaaaaaaag

SEQ ID NO: 1140 - DNA, 191 bp, Homo sapiens
aaaaaatggacttatctctattatacagagttataatataaaaatgatttaaaggctatatttttcagcatgtaggtagctacactgtaatcctgttgaagaaactttcctatttaagcttataggatgaaaatatataattaaagtcttctgatcatagcttgagaccatcaagggaatgtttagtttcc

SEQ ID NO: 1141 - DNA, 149 bp, Homo sapiens
aaaattaaaaatgttttattggctattgcctttaatagatttactacaataaaggaaaggaatatttttctcaaatgtgctaataagaaaaagacccaggaaactgaacgatattggacacagttttcagtgttttagacataaataaa

SEQ ID NO: 1142 - DNA, 485 bp, Homo sapiens
  misc_feature 249, 315, 353, 365, 386, 422, 448, 466, 468, 476, 480: n = A,T,C or G
gcccagagcctggctgcccatcatgtggccccacccaatcaagggaagaaggaggaatgctggactggaggcccctggagccagatggcaagagggtgacagcttcctttcctgtgtgtactctgtccagttcctttagaaaaaatggatgcccagaggactcccaaccctggcttggggtcaagaaaacagcccagcaagaattaaggggccttaagggcacttgggcttgttggttccatttgaaancccgactcttggcccttggccctttactttgctttcttctaacctcttctaaggccctcttccaantttggcacccttgttcccccaaccccttccacttcaanaaccttgccccngggggggcccgcttcgaaaangggccgaaatttccaaccaccactttggcgggccgnttacttagtgggaatcccgaacttcnggtacccaaacctttggngntaatcatngggnataag

SEQ ID NO: 1143 - DNA, 439 bp, Homo sapiens
  misc_feature 410: n = A,T,C or G
gtaagatggcctctgatttacactggttcaatttacaaattttcaactttatgataggtttatcagggtactaaatgcatttcaacttgatagtttcaacttatgataggtttaccaggatgtagtcccactgttgaggagcatctatttaggggttaattactttagtaataagtggaaagtaagataccttgagtaatgtttgcctataaaattgtcagcgtatttttacactattggctcaagaatgttataatgctaagggacataagttggcaaccacttggtttttggaaggactttcggtattgtattagaagtctgccctagctgttaaatttctgggtatttatcctaaggaattaattaaagagttaattgttcctttcttcagtgggccattgttttanatatttacctgccccgggcggcccgctcg

SEQ ID NO: 1144 - DNA, 263 bp, Homo sapiens
ccttggttacacaactccagcaaccgggccccaaatccactatctgtgcaatgcagcacatgcgcagcaatgctattaaactgctcttggagaaattccaggtttgtccggatgatgtccacacctggctgaacctgcaccaaggaaaaactctcccgcacatactcttctagccccgtgatcaatgtgtgggttgccatccggatgttactgggtgtgggctcctgaccacccaggtagtgctggtggaagaaggatcgcag

SEQ ID NO: 1145 - DNA, 286 bp, Homo sapiens
cgcggcggcaagatggcagtgcaaatatccaagaagaggaagtttgtcgctgatggcatcttcaaagctgaactgaatgagtttcttactcgggagctggctgaagatggctactctggagttgaggtgcgagttacaccaaccaggacagaaatcattatcttagccaccagaacacagaatgttcttggtgagaagggccggcggattcgggaactgactgctgtagttcagaagaggtttggctttccagagggcagtgtagagctttatgctgaaaaggtgg

SEQ ID NO: 1146 - DNA, 489 bp, Homo sapiens
  misc_feature 235, 289, 292, 295, 308, 312, 331, 345, 348, 351, 358, 370,372, 385, 387, 408, 428, 433, 440, 441, 447, 460, 467, 468,474, 480: n = A,T,C or G
aaacttgcagagtgcaaacttgcaataattcattgtgccggttattcagaccctatattggtgcagacactttggcaagatatcatagagaaagaattgagtgacagtgtgacattgagctcctcggatagaatgcatgctcttagtctcaagattgttctccttggcaaaatttatgctggcacaccacgcttctttcctttagattttattggacaagttttagaaccagcanggttgtactttgaactgggatgggggcttctaatacaaaccatgaatgaaattngantanccttgctaaactnctanaagttattatcagtggtcnaatcaccggatcantcntgnacaaatnaaaacccctgcncnttggatggtaccngnttttggaaaaatggtggaaanccaccaattttcctcccggngcctncaaaggnnaatccnccctgggggcgtncttgggnnccaccnggccanctggggaaa

SEQ ID NO: 1147 - DNA, 544 bp, Homo sapiens
  misc_feature 531: n = A,T,C or G
ctttaattaaggcattggtcccaacggtgcacatagattaagggattttgcttccttctgaactagatcatttgttagaggcttcagaaaaagaaaattagcttgaaatctagtctgggaaattgggggcagggaatgaaaaagttggtctcttgtttctccacgatacacaggcttcccatctaaagtcatgcttaactaaaagggaaaaaaaatgaaccaagcaaaagtatatagagtagccgtgacatttgcattattttctagactttacatttgcctgcaacaggcataacatgaaactccagagggaatttggattgataggaatgttcacataaacaccagcagtggctaactgttacacaacattcaaagtattcgagagaactgctggagacagagagcgagggtccacagacacattagcaccatactgataggcatgcagcaggatgttcacctgccggcggccgcgaaggcgattcaaccactggcggccgtctatggatccactcgaccaacttgggnaatatggctactg

SEQ ID NO: 1148 - DNA, 397 bp, Homo sapiens
ctgggtaccattccgggtcatccgcagaaattcctcatagatggcaactctgtctactctccgagccagtggcgagaagttacacagggagtccaccccggtgtggtgcctgttggggacagacctgaatgttgaaacttgacagtcagaaaaataactcttgatgctgctgtttcggaagagttggttgagcgcatcctcaatattccttttgttcctctggtaattggtggtgcctggctgggctttgtcctgggaatatggtaggttggtgatggtgaaattcaggtagaagtgctgagtgctggagctgcttgttggttgataaactgatgactccatttctgtcacatggatgtccaccaactggtaggcggacccagccaatggaatgagg

SEQ ID NO: 1149 - DNA, 137 bp, Homo sapiens
ctgcagcttttcaccacattttcaattactgaattgcatgttttttttccaccttgataacttagggtcagtagaaagctatttacttacatgttatagtcaatataactatactaaatgcccatttgtaattgaag

SEQ ID NO: 1150 - DNA, 171 bp, Homo sapiens
ctggacccttacacacttcctaatggcagaatttggctgtttggcttcaactcctactttttccagcacgattccttttgcatgagaagcacctccaaaagggttggcctttagggctgtgcccaaatgagctttcttatactgtttatcatgccacttctggtctcgtcg

SEQ ID NO: 1151 - DNA, 112 bp, Homo sapiens
aaatccttgaggggtacagcatcactcggattctgtgtccaatggccttagcaggaagattgcttcggaatttggcacgaaccatgccactgtttccatgggcccgagttac

SEQ ID NO: 1152 - DNA, 140 bp, Homo sapiens
aaacttgatccaacctctttgcatcttacaaagttaaacagctaaaagaagtaaaataagaaggcaatgcttgtggaatgtacagtgcatattggcggcgcgcgcctcattacgattcgcctgcttgcttctcctgttca

SEQ ID NO: 1153 - DNA, 481 bp, Homo sapiens
  misc_feature 14, 295, 337, 338, 420, 425, 429, 434, 439, 441, 446, 454,457, 459, 464, 474, 476: n = A,T,C or G
ctgacacagactangatcgagttctcccacggccttcctatcccgtctctaatttactctctgcttttccctggaatgtgcatgagaaataaaccttccaaacatttcaaaagtcgcactttcctcctttattacaacgatgcccatttttaacgacactctcggtggcccctgacagctacctggtgagatacacagcatattgtgcccattgaatgaagatacttctgacaatgaggctttctcgtgaaataaaggtttcccgtctcataaaactgaaaatctttggaaaganctgagtggaaatggcttttgaagaaggcagtgattcactaanntatttgaaaacttaaggtagtgaagggtagaaaaccaacccaaaacaatcaaggggggaccgactggccccttgacttttgntggcnaacnaaaanaaatntntaaancctggtantcncnaaacnaattaaaacnanccctc

SEQ ID NO: 1154 - DNA, 688 bp, Homo sapiens
  misc_feature 507, 515, 519, 544, 550, 569, 571, 592, 607, 615, 624, 625,629, 637, 644, 654, 676, 679: n = A,T,C or G
aaaatttttatttgaatgaaatcattgtaataatcattaaagtgatttgaaatagaatgatctctgtgaaaggaagtttatagcatcactatttataggagagaaagcagcagaggtatgcatccggaagtgaatataacattgtaaaatcagcccacattaaataccaaaaaagtaagaaccatcaaaatgcagcattatttacaggattaaaaagtgtgaacagtacagagttaaactttcttatgtgtgaattttgacctgctatgttgttagcaaaaagctttagtgtttgtataaaatgatgtgtacccttatcccaaccaccaccagatcaagacacaaactgacaatgattccttccttattttacagctttattactgatttccctctaaaaagagactcaagtgtggagctgactcatctatagattaaggaatcacaaagtaccatagtcacttaacaaatgcaaaaaaaaaaagcaatggtttacctttcacctgntgggggtntgtncaatctttccaaaaaagcatactgngcttcntgacctgatttttcacccntnaatttaaaaccaccctttaanctttgggtctttttncttcaaanaaagctttnntttncctgccgnaccctangggaatcccncctggggcgtctatggtccacncgnccactgggg

SEQ ID NO: 1155 - DNA, 410 bp, Homo sapiens
  misc_feature 384: n = A,T,C or G
ccaagagaatgcttatttaagtgttagacttccattctggcaaaatcttgccttatcagaagacattggaaagagggattccctttggtgtttggtcttctacttagaaaaacctattgcagttagtttatcttgtagtattcatctttgtattctgaagataaggtttgaattaaattgatacacacagaggggaaccgattttttctatccaatgtgaattataaatgagataatccacagttattcattgtggagttgttgagactatgaaagactcattgtctttgtattcagctcttaaatagtgtaactatatccccacctctgcttgctttctttccctcccctccaatgataaagaaaatgataaattttctgtgngcattcaattcttattttacctgccc

SEQ ID NO: 1156 - DNA, 358 bp, Homo sapiens
ccatggtcccagtggtagtgtctttatgctcataagcagtgagggcaactagaggtcactttcatcatcatctgctggtttcagcaggcttctccactgcaccctgttttgaccagatcctgctctgttcaatggggttgggaatggaaaataagtccttctggtctcctacctcatttccccatcagtgattatatactcctccttaatcttaaggggcttgcagaagggcggaggttcatcttctgtaactgcttcctgctgatgttatgggcatagaccctgcctagcactggagaggtaaaatccctggatacctgttctaaaaggctcaaaggtaggatgtctttatcttctg

SEQ ID NO: 1157 - DNA, 262 bp, Homo sapiens
ctgccaaggagaccctgttatgctgtggggactggctggggcatggcaggcggctccggcttcccacccttctgttctgagatgggggtggtgggcagtatctcatctttgggttccacaatgctcacgtggtcaggcaggggcttcttagggccaatcttaccagttgggtcccagggcagcatgatcttcaccttgatgcccagcacaccctgtctgagcaacacgtggcgcacagcagtgtcaacgtagtagttaacag

SEQ ID NO: 1158 - DNA, 325 bp, Homo sapiens
gtccgctgtggcgggaaagcggcccccagaaccgaccacaccgtggcaagaggacccagaacccgaggacgaaaacttgtatgagaagaacccagactcccatggttatgacaaggaccccgttttggacgtctggaacatgcgacttgtcttcttctttggcgtctccatcatcctggtccttggcagcacctttgtggcctatctgcctgactacaggatgaaagagtggtcccgccgcgaagctgagaggcttgtgaaataccgagaggccaatggccttcccatcatggaatccaactgcttcgaccccagcaagatccag

SEQ ID NO: 1159 - DNA, 255 bp, Homo sapiens
  misc_feature 240, 244, 251: n = A,T,C or G
aaaaacctggggaactttaggttatttatacaaagggaataaataggctgattttaatttggtaagttgatctttttattatgaatttggtaatagtataggtttattatttattcatctaattttatagtacaggttttgtaatgttacatgtgatgatatgagctcccaccttatatgggggaacatcttgggaatttgagatttaataagttttttttttttttttttttttagggntttnccggcancccc

SEQ ID NO: 1160 - DNA, 242 bp, Homo sapiens
  misc_feature 231, 232, 236: n = A,T,C or G
ttaaaatcctgattttggagacttaaaaccaggttaatggctaagaatgggtaacatgactcttgttggattgttattttttgtttgcaatggggaatttataagaagcatcaagtctctttcttaccaaagtcttgttaggtggtttatagttcttttggctaacaaatcattttggaaataaagattttttactacaaaaaaaaaaaaaaaaaaaaaaaaaaaaacccnncccngggggg

SEQ ID NO: 1161 - DNA, 213 bp, Homo sapiens
  misc_feature 100, 102, 104, 110, 113, 140, 158, 177, 179, 199, 208: n = A,T,C or G
aaatctagagtaaaaccaagctggcccaaggtgtcctgcaggctgtaatgcagtttaatcagagtgccattttttttttttgttcaaatgattttaattntngnaatgcncantttttttaatatgcaaataaaaagttnacctgcccgggcggccgntcaaaagggcaaattccancncactggcggccgttactagnggatccaanctcgg

SEQ ID NO: 1162 - DNA, 407 bp, Homo sapiens
  misc_feature 19, 303, 328, 340, 343, 349, 351, 354, 367, 368, 373, 379,385, 387, 390, 396: n = A,T,C or G
tcttccaggagattaatcnatgaaatttataagttttatcaacgtataaaatttttttcatcttctgggactcatagaatacaatctgtgtttctgaccagttgaggtagttaaaatagggagggcttttctaatttcgtatttgactatttcagaaagaaaggttatcttttactggtgagcacagtcattgctctgcagatgggctaggattcaaagaatataacacagtgttgttatcataaagagtgttgaaagtttatttattatacaccattgagacattttgaaattggaattggnaaaaaaataaaaacctgccccggcnggcccttcaaanggngaattncnacncccctgggcgccnncctangggaanccaacntnggncccaancttgggggaaa

SEQ ID NO: 1163 - DNA, 187 bp, Homo sapiens
gcaggaggcatgccaggaggaatgcctgggggatttcctggtggtggagctcctccctctggtggtgcttcctcagggcccaccattgaagaggttgattaagccaaccaagtgtagatgtagcattgttccacacatttaaaacatttgaaggacctaaattcgtagcaaattctgtggcagtttt

SEQ ID NO: 1164 - DNA, 312 bp, Homo sapiens
aaatgggccagaatctataaacagtgattgccgaaataatctagagatgacagtgcagagaaattatgttcagacaataatataaaaatttagaaaaggaagcactagaatttttaatgatctgaaataaatatttttcataaaatttaatgtattctttttttgtttgtttttgatacacagtcactctgtcacccaggctggagtgcagtggtgcaatctccactcactgcaacctccaccacttgggatcaagtgattctcccggctaatttttgtatttttagtagagacagggttttgccatgttgg

SEQ ID NO: 1165 - DNA, 322 bp, Homo sapiens
  misc_feature 43: n = A,T,C or G
aaaatcctgattttggagacttaaaaccaggttaatggctaanaatgggtaacatgactcttgttggattgttattttttgtttgcaatggggaatttataagaagcatcaagtctctttcttaccaaagtcttgttaggtggtttatagttcttttggctaacaaatcattttggaaataaagattttttactacaaaaatgaaatttgtttggacttccacttgagacagtaaagagagtattagacacccagtaaaaactgccatataaagaagttgtaattgtttgttgtgtatgtatttttttcaatgccaaaccag

SEQ ID NO: 1166 - DNA, 96 bp, Homo sapiens
gtgatacccaaaatccagtgccttccaccaagccaggatgaggaagtacagacaattggtcagatagaactgtgcctcactaagcaagaccagcag

SEQ ID NO: 1167 - DNA, 256 bp, Homo sapiens
  misc_feature 227, 230, 232: n = A,T,C or G
gggaatgtgaaatttacatcatttctttttgggagagacttgttttggatgccccctaatccccttctcccctgcactgtaaaatgtgggattatgggtcacaggaaaaagtgggttttttagttgaattttttttaacattcctcatgaatgtaaatttgtactatttaactgactattcttgatgtaaaatcttgtcatgtgtataaaaataaaaaagatcccanatnanaaaaaaaaaaaaaaaaaaaaaaaa

SEQ ID NO: 1168 - DNA, 266 bp, Homo sapiens
cacaatgtaaaaaagaatagtaatatcagaacaggaaggaggaatggcttgctggggagcccatccaggacactgggagcacatagagattcacccatgtttgttgaacttagagtcattctcatgcttttctttataattcacacatatatgcagagaagatatgttcttgttaacattgtatacaacatagccccaaatatagtaagatctatactagataatcctagatgaaatgttagagatgctatatgatacaactgtgg

SEQ ID NO: 1169 - DNA, 143 bp, Homo sapiens
catttaccagggctctgaggccgacagcgtcttcagcggcttcctcatcttcccatctgcctgagccagggaaggaccccctcccccatccacctctctggcttccatgctccgcctgtaaaatgggggcgctattgcttcag

SEQ ID NO: 1170 - DNA, 448 bp, Homo sapiens
aaaggattatagtgctgcattgtctgaagttagcacctcttggactgaatcgtttgtctagactacatgtattacaaagtctctttggcaagattgcagcaagatcatgtgcatatcatcccattgtaaagcgacttcaaaaatatgggaacacagttagttatttttacacagttctttttgtttttgtgtgtgtgtgctgtcgcttgtcgacaacagctttttgttttcctcaatgaggagtgttgctcatttgtgagccttcattaactcgaagtgaaatggttaaaaatatttatcctgttagaataggctgcatctttttaacaactcattaaaaaacaaaacaactctggcttttgagatgacttatactaatttacattgtttaccaagctgtagtgctttaagaacactacttaaaaagcaaaataaacttggtttacat

SEQ ID NO: 1171 - DNA, 323 bp, Homo sapiens
  misc_feature 3, 10: n = A,T,C or G
ggnagacaangtattttatttctgactgattttagaaaaaacttgtgtacatgtgtttggaactgttgaaatgccaagttttctgtataagtgtttttgtaattaaactttcagattttctttgttttttaagaagttgatgtgcttgtttgacatttgtctcattaaaacttttctacgttgaattcacctgtttcaattttacttgctttgtaacaaaaagtcctacctctggccgggcacggtggctcatgcctgtaatcccaacactttggaaggccaaggcaggcagatcacgaggtcaagaaatcgagaccatcctg

SEQ ID NO: 1172 - DNA, 232 bp, Homo sapiens
ccagtttgtgcagttccagtagtgactgattcacatttttttccaaatgtaatgcacactccattgcattcagcccgctctcccagtcatcacagtctggtttcttgatatcctgaaggaagattcagccacctcgttggttctgcagcttcatcagtttctcagcatgttccctctcctcatgagattggtgaagaaagtatttggcaaagttcttcaaagccacatcatc

SEQ ID NO: 1173 - DNA, 425 bp, Homo sapiens
caatctttcctgttgcctgtggagtctctgctgaaatgaatcaggattcgagctctaggatgagacagaaaatgaaagcatgttgtttgccaggacactgtgggtttatattgatgtgtaacaagttgatttggaacactggactctcattctgttattctggttttgttttttttgttttgttttttttcttttgtaaaggcaatgagctagtcccagaaaggatccttcagttacatacaatttgtttaatgaaatgtcatggctctgttcatatttttgtcttgttcttccaattggtatatacaactttcagagcctcttgtatttggaaggctggaagggcccagactttggaatagtgtcttggtttcactgtttttgttttgatttttttttgttttgattttttttacctcggccgc

SEQ ID NO: 1174 - DNA, 200 bp, Homo sapiens
aaaataacagctaaaagaaaagctctgaatgttactctttattctggtaggtatgatttacccagtattgtttacatgccttgatttagtatcagtgagtatctcctgtatgcaaggcgctcagagccatgattcctagcttctaacatccgatttctaggcctctcatgcagatgccaataaaggatctgtgtacagcc

SEQ ID NO: 1175 - DNA, 194 bp, Homo sapiens
ctgtggaggagggtttcagaggagagaggtcggagagcagaggcctgagaagccagaggcaggtggagagagggtggaaagtgagcagcgggctgggctggagccgcacacgctctcctcccatgttaaatagcacctttagaaaaattcacaagtccccatccacaaaaaaaaaaaaaaaaaaaaaaattttc

SEQ ID NO: 1176 - DNA, 140 bp, Homo sapiens
aaacaaaaccagagtcatctggggaaaagtaactcgggcccatggaaacagtggcatggttcgtgccaaattccgaagcaatcttcctgctaaggccattggacacagaatccgagtgatgctgtacccctcaaggattt

SEQ ID NO: 1177 - DNA, 189 bp, Homo sapiens
aaacttcacgttgtccttatttttcttgatcttgacagatttggcatcctttcgtcgggctgtgagcaggaagtccttgatttcctcaattttccgaggcatggcgacgaggcgcgctgggctctggcgcggaccaggacctttctcacccacgtatcaccctagagacactcacagcaagcagcaacc

SEQ ID NO: 1178 - DNA, 171 bp, Homo sapiens
ccaggggtaggatagtataggaagtagaaggggaaggagggttagatagagaatgctgaataggcagtagttgggagagagcctcaatattgggggaggggagagtgtagggaaaaggatccactgggtgaatcctccctctcagaaccaataaaatagaattgacctttt

SEQ ID NO: 1179 - DNA, 432 bp, Homo sapiens
ggcaggttctaaaagatctagttaaagttattcaacaggagtcttacacatataaagacccaattacagaatttgttgaatgtttatatgttaactttgactttgatggggctcagaaaaagctgagggaatgtgaatcagtgcttgtgaatgacttcttcttggtggcttgtcttgaggatttcattgaaaatgcccgtctcttcatatttgagactttctgtcgcatccaccagtgtatcagcattaacatgttggcagataaattgaacatgactccagaagaagctgaaaggtggattgtaaatttgattagaaatgcaagactggatgccaagattgattctaaattaggtcatgtggttatgggtaacaatgcagtctcaccctatcagcaagtgattgaaaagaccaaaagcctttcctttagaa

SEQ ID NO: 1180 - DNA, 251 bp, Homo sapiens
agacaactggctttggcatgatttatgattccctggattatgcaaagaaaaatgaacccaaacatagacttgcaagacatggcctgtatgagaagaaaaagacctcaagaaagcaacgaaaggaacgcaagaacagaatgaagaaagtcagggggactgcaaaggccaatgttggtgctggcaaaaagaagtgagctggagattggatcacagccgaaggagtaaaggtgctgcaatgatgttagctgtgg

SEQ ID NO: 1181 - DNA, 122 bp, Homo sapiens
  misc_feature 1: n = A,T,C or G
ncgagtcctggccttgtctgtggagacggattacaccttcccacttgctgaaaaggtcaaggccttcttggctgatccatctgcctttgtggctgctgcccctgtggctgctgtcaccacag

SEQ ID NO: 1182 - DNA, 277 bp, Homo sapiens
  misc_feature 1, 199, 256, 264: n = A,T,C or G
nctgccctcttgggtttaggtgttgttccttcacggaatccatgcctgaatctgcggtatacaatttttaggtgcctcattcgaccagttccggtggtatttcgtcttttagccttggcactccagttatactttctcttgcgcttggcagggtagccacatttgccacaggtcgacttctgaaggtggtaggccttanagccacagcggcggcacaacgtgtgcgtcttattgcgacgctttccaaacgatgacnttcccttngcatctcgcacct

SEQ ID NO: 1183 - DNA, 257 bp, Homo sapiens
atgccccctaagtgacccggacacttccgagggggccatcaccgcctgtgtatataacgtttccggtattactctgctacacgtagcctttttacttttggggttttgtttttgttctgaactttcctgttaccttttcagggctgacgtcacatgtaggtggcgtgtatgagtggagacgggcctgggtcttggggactggagggcaggggtccttctgccctggggtcccagggtgctctgcctgctcagccagg

SEQ ID NO: 1184 - DNA, 206 bp, Homo sapiens
gcgcttgcgtgtcggcctctgtggcaggtgcgagtgacacagtggaagcaggctaagtcctatcagccatggaaacaccattgctctcttcttccggtcactgttgccaaactataccatggagggggagaggcccgaggaaggagtggctgggggtctgaaccgcaaccagggcctgaacaggctgatgctggctgtgcgcgaca

SEQ ID NO: 1185 - DNA, 175 bp, Homo sapiens
ccctatcacacgtggccttgtctagaccctgtcctgagcaggggagaggctcttgagacctgatgccctcctacccacatggttctcccactgccctgtctgctctgctgctacagaggggcagggcctcccccagcccacgcttaggaatgcttggcctctggcaggcaggcag

SEQ ID NO: 1186 - DNA, 291 bp, Homo sapiens
ccacatcggcagggtcggagccctggccgccatactcgaactggaatccatcggtcatgctctcgccgaaccagacatgcctcttgtccttggggttcttgctgatgtaccagttcttctgggccacactgggctgagtggggtacacgcaggtctcaccagtctccatgttgcagaagactttgatggcatccaggttgcagccttggttggggtcaatccagtactctccactcttccagtcagagtggcacatcttgaggtcacggcaggtgcgggcggggttcttgc

SEQ ID NO: 1187 - DNA, 171 bp, Homo sapiens
aaaaggtcaattctattttattggttctgagagggaggattcacccagtggatccttttccctacactctcccctcccccaatattgaggctctctcccaactactgcctattcagcattctctatctaaccctccttccccttctacttcctatactatcctacccctgg

SEQ ID NO: 1188 - DNA, 292 bp, Homo sapiens
cctccagggcatgtaagaggcacagaacactcccagaacccagaatctgctgtcatctgagtgcctgagcaacttacataaccatcagcttttagacgaacttacacatttcctatttgacagaaatctcttccacaatttggtcactacatttgacttgctatttcaaaagaagtccacatgtcatgaaacaccaaccaatttttatcaatcacttaccaatatgaggttaagaagttaagacaaccatttttacagataaaacacatgaatccaatgaccttcctcacag

SEQ ID NO: 1189 - DNA, 263 bp, Homo sapiens
  misc_feature 175, 178, 179, 186, 188, 190, 196, 200, 215, 216, 226, 246,251, 254, 256: n = A,T,C or G
aaatgtcccacgtttatttacatatgaaatgtgtttcatacagttatgatggatggagtgcataacacctgacagcagcaagaccttttgaggaaccgaacattgactacagtatatcatgcaagtatctatatatacacaaaagaattccttttcttaaaaaaaaaaaaaaaanggnncaaaacntntncggggntaantccaaaatccaaatnncaaaaaaaancccaaaccaaacccaaaaantaaanctntntcaaaaa

SEQ ID NO: 1190 - DNA, 159 bp, Homo sapiens
ggcaggtgtggtgtttgtgggcacgagaggggcagagaatggagagtgaggctaccacatgaagcgtcaccagagctgctccctgctgcctgctcagagcaccccggatccactgttcaatctgcacaagattcggggtccagacatgggagacttcag

SEQ ID NO: 1191 - DNA, 738 bp, Homo sapiens
  misc_feature 1, 569, 631, 649, 658, 659, 670, 683, 688, 692, 694, 701,703, 710, 716, 719, 720, 733: n = A,T,C or G
ncctgggaccaaatgaaggctgagaggtatggctcatcggtacaagagagatgcaaaaaactaagttggaaagtaaaggctacacacacatatggagcaccccatcccacagcacattacatccacctcacttcacagaacggagaacagagcagaaatgaccagaacacctttgtcaccatcacacagccctcctaaaatggaaccaaagcttcccagctccctcaaagctttggatgcaaagaaggcaccctgacttccacaagacaccagaattcacacggtactcagaggcactgctggggaagtttgttggtctttattagataaatttccagagacctgtccataatacccaacagaacatgactgtttctttgaggaaagggttataatgtctgtggtgtacaagtcgtttttggtataacttctttcctgctgctgctgcttcccggcaaacatagttttcctatttcaggcagagtgcggtatattccaggaaacacttgtttcctactcacttagcttactttctttgttgaatgcctcactaatggccaagtttcaanatgttttgggtgacaatgcacacattgcttgggcaaaaagggtgatgggaccctcggccccnaccacgcctaaagggcgnaatttccanncacactgggcnggccgctactaanggatncgancntcggtancnaaccttngggcgnaannaatgggccatagnctgct

SEQ ID NO: 1192 - DNA, 105 bp, Homo sapiens
ggaaccgtggcgtccctgcgtggggcccatgggtgagacactccagtactgagacctagagtccagatgcttgtaggagccaagtcgtgttctaagtatttattt

SEQ ID NO: 1193 - DNA, 346 bp, Homo sapiens
  misc_feature 1: n = A,T,C or G
nctgattttatttccttctcaaaaaaagttatttacagaaggtatatatcaacaatctgacaggcagtgaacttgacatgattagttggcatgattttttcttttttttcccccaaacattgtttttgtggccttgaattttaagacaaatattctacacggcatattgcacaggatggatggcaaaaaaaagtttaaaaacaaaaacccttaacggaactgccttaaaaaggcagacgtcctagtgcctgtcatgttatattaaacatacatacacacaatctttttgcttattataatacagacttaaatgtacaaagatgttttccacttttttcaattttta

SEQ ID NO: 1194 - DNA, 207 bp, Homo sapiens; identical to SEQ ID NO: 1105

SEQ ID NO: 1195 - DNA, 627 bp, Homo sapiens
  misc_feature 6, 466, 485, 511, 516, 526, 530, 542, 551, 556, 562, 569,571, 574, 610, 622, 624: n = A,T,C or G
ctgggncctacattagtgccttacgggtgaacaaggtgattgagattaacccttacctgcttggcaccatgtctggctgtgcagcagactgtcagtactgggagcgcctgctggccaaggaatgcaggctgtactatctgcgaaatggagaacgtatttcagtgtcggcagcctccaagctgctgtccaacatgatgtgccagtaccggggcatgggcctctctatgggcagtatgatctgtggctgggataagaagggtcctggactctactacgtggatgaacatgggactcggctctcaggaaatatgttctccacgggtagtgggaacacttatgcctacggggtcatggacagtggctatcggcctaatcttagccctgaagaggcctatgaccttggccgcagggctattgcttatgccactcacagagacagctattctggaggcgttgtcaatatgtnccacatgaaggaagatggntgggtgaaagtagaaagtacagatgncagtnacctgctganccantaccgggaaacncatcaatantgggnggtggnggaagancntcngcctgagaccaccgctaagggggcgaaatttccagnacaactttgtcngnacc

SEQ ID NO: 1196 - DNA, 374 bp, Homo sapiens
  misc_feature 32: n = A,T,C or G
atgacattggtggtcctgatcaagaatttggngtggacgttggccctgtttgctttttataaaccaaactctatctgaaatcccaacaaaagaaatttaactccatatgtgttcctcttgttctaatcttgtcaaccagtgcaagtgaccgacaaaattccagttatttatttccaaaatgtttggaaacagtataatttgacaaagaaaaatgatacttctctttttttgctgttccaccaaatacaattcaaatgctttttgttttatttttttaccaattccaatttcaaaatgtctcaatggtgctataataaataaacttcaacactctttatgataaaaaaaaaaaaaaaaaaaaaaaaaaaaaaaaa

SEQ ID NO: 1197 - DNA, 279 bp, Homo sapiens
  misc_feature 168, 172, 178, 192, 194, 226, 245, 260, 265, 272: n = A,T,C or G
gggaaggaaagaacttgcatgttggtgaaggaagaagtggggtggaagaagtggggtgggacgacagtgaaatctagagtaaaaccaagctggcccaaggtgtcctgcaggctgtaatgcagtttaatcagagtgccatttttttttttgttcaaatgattttaattnttgnaatgcncaatttttttaatntncaaataaaaagtttacctgcccgggcggccgntcaagggcaaattccaccncactggcggccgttnctagnggatccnagctcgg

SEQ ID NO: 1198 - DNA, 293 bp, Homo sapiens
gagacgatgaagaacaattagactggacccacccaccacagcccatcaccctccatttccacttggtgtttggttcctgttcactctgttaataagaaaccctaagccaagaccctctacgaacattctttgggcctcctggactacaggagatgctgccacttaataatcaacctggggttcgaaatcagtgagacctggattcaaattctgccttgaaatattgtgactctgggaatgacaacacctggtttgttctctgttgtatccccagccccaaagacagctcctgg

SEQ ID NO: 1199 - DNA, 561 bp, Homo sapiens
ctgggtaccattccgggtcatccgcagaaattcctcatagatggcaactctgtctactctccgagccagtggcgagaagttacacagggagtccaccccggtgtggtgcctgttggggacagacctgaatgttgaaacttgacagtcagaaaaataactcttgatgctgctgtttcggaagagttggttgagcacccccttctcaccgcatcctcaatattccttttgttcctctggtaattggtggtgcctggctgggctttgtcctgggaatatggtaggttggtgatggtgaaattcaggtagaagtgctgggtgctggagctgcttgttggttgataaactgatgactccatttctgtcacatggatgtccaccaactggtaggtggagcccagccaatggaatgaggcattcagggtcttatctagaaagacttgctccaccaggctggggtccaaattggaggagaacaatgccttgacagtgaccaacacggagtccatcgtcaagttggtacctgcccgggcggccgctcgagccctatagtgagtcgtatta

SEQ ID NO: 1200 - DNA, 335 bp, Homo sapiens
  misc_feature 303, 328, 329: n = A,T,C or G
cgaggaaatagtatcatcatgttagaagccttggaacgagtataaataatggctgttcagcagagaaacccatgtcctctctccatagggcctgttttactatgatgtaaaaattaggtcatgtacattttcatattagactttttgttaaataaacttttgtaatagtcaaaaatgctttctcagatgttctgaatatagaatatcagctctcattccagttttttctaacatgaattttcctggttgacattgatttcaaagggttttatgcattaaagtgaaagaatcttattaaatgcnaaaaaaaaaaaaaaaaaaaaaaaanntttttt

SEQ ID NO: 1201 - DNA, 441 bp, Homo sapiens
ggcaggtaaaaaagtgacattgctttattactattggcaggtggggcctgcatgaggtggttagtgtgctcaggggatgggtgggctgtggagatgatgacagaaaggctggaaggaaagggggtgggtttgaaggccagggccaaggggtcctcaggtccgcttctgggaagggacagccttgaggaaggagtcatggcaagccatagctaggccaccaatcagattaagaaattctgagaaatctagctgaccatcactgttggtgtccagtttcttcatcatgcggtcaaggacaccagggtccttctggttctttgtgaaggcagctagttctgtattcatgaagcttaggaactctgtcttggagagagtgtagttataaccatcctttccagcatacttctggaagacagcaatcagggactcgatgcaccgctc

SEQ ID NO: 1202 - DNA, 311 bp, Homo sapiens
  misc_feature 30, 268, 307: n = A,T,C or G
gcatttttcacatttgtcaactctggttanaaacaggtcctcaggagtattctctaacctgatattttctaaaaagatatgttgattcaactttgtttagcatcctactttctagattgtggggctcattttgccagggccaagctaccagaaaagtagaagtggagattacctggtatgtatctctctgggtgccccagttagagctgccacagctcaggaaaaagatgaggcataacgaccttgaatgtaattggagtaagtgacnaaataagaactaccctgggaaaccctgcattcaatgtanctgt

SEQ ID NO: 1203 - DNA, 307 bp, Homo sapiens
ctgttgccgaggcctgggctcgcctggaccacaagtttgacctgatgtatgccaagcgtgcctttgttcactggtacgtgggtgaggggatggaggaaggcgagttttcagaggcccgtgaggacatggctgcccttgagaaggattatgaggaggttggagcagatagtgctgacggagaggatgagggtgaagagtattaacctgtgtgctgtacttttacactcctttgtcttggaactgtcttatttttgttctgtaaatgtctattgccgtaaattgttaataaaattgatgtttccatttt

SEQ ID NO: 1204 - DNA, 714 bp, Homo sapiens
  misc_feature 418, 562, 584, 605, 633, 647, 658, 675, 682, 683, 689, 698,704, 705: n = A,T,C or G
ctggaaccacaaagcagccctctaaggaggaggaggaagaggaggaggaggaacaactgaaccagaccttggcagaaatgaaggcccaggaggtggcggaattgaagaggaagaaaaagaagctgttgcgtgagcagagaaagcagcgggagcgtgtggagctgaagatggatccgcctggggtttccattgcagacgagggggagactggcatgttctccttgagcaccatccggggtcaccagttattagaggaagtaacacaaggggatatgagtgcagcagacacatttctgtccgatctgccaagggatgatatctatgtgtcagatgttgaggacgacggtgatgacacatctctggatagtgacctggatccagaggagctggcaggagtcaggggacatcagggtctaanggaccaaaagcgtatgcgacttactgaagtgcaagatgataaagaggaggaggaggaggagaatccactgctggtaccactggaggaaaaggcagtactgcaggaagaacaagccaacctgtggttctcaaagggcagcttttnctgggatcgaggacgatgcccnatgaggccctggagatcagtncaggccccagacctgccccggggcgggnccgcttcaagggcnaaatttcccanccaccaccttggccggnccgtttnncttaantggggattncccaanncttccgggt

SEQ ID NO: 1205 - DNA, 336 bp, Homo sapiens
aaggaatcgtatcgtatgtccgctatccagaacctccactctttcgacccctttgctgatgcaagtaagggtgatgacctgcttcctgctggcactgaggattatatccatataagaattcaacagagaaacggcaggaagacccttactactgtccaagggatcgctgatgattacgataaaaagaaactagtgaaggcgtttaagaaaaagtttgcctgcaatggtactgtaattgagcatccggaatatggagaagtaattcagctacagggtgaccaacgcaagaacatatgccagttcctcgtagagattggactggctaaggacgatcag

SEQ ID NO: 1206 - DNA, 274 bp, Homo sapiens
  misc_feature 1: n = A,T,C or G
ntggcagtgcaaatatccaagaagaggaagtttgtcgctgatggcatcttcaaagctgaactgaatgagtttcttactcgggagctggctgaagatggctactctggagttgagatgcgagttacaccaaccaggacagaaatcattatcttagccaccagaacacagaatgttcttggtgagaagggccggcggattcgggaactgactgctgtagttcagaagaggtttggctttccagagggcagtgtagagctttatgctgaaaaggtgg

SEQ ID NO: 1207 - DNA, 240 bp, Homo sapiens
  misc_feature 189, 201, 230, 232, 233: n = A,T,C or G
tgtttcccagcaaagatcaacctctgctggtcaggagggatgccttccttgtcttggatctttgccttgacattctcgatggtgtcactcggctccacttcgagagtgatggtcttaccagtcagggtcttcacgaagatctgcatcccacctctaagacggagcaccaggtgcagggtggactctttntggatgttgtantcagacagggtgcgtccatcttccagatntnncccagca

SEQ ID NO: 1208 - DNA, 161 bp, Homo sapiens
aaagaagtaagcctttatttccttgttttgcaaataaaactggctaagttggttgctttttggtgattagtcaaagagaccaaatcccatatcctcgtccgactcctccgactcttccttggcttcaaccttagctggggctgcagcagcagcaggagcag

SEQ ID NO: 1209 - DNA, 206 bp, Homo sapiens
gcagaaaaaagggttgccaccccagttgattggaaggatggggatagtgtgatggtccttccaaccatccctgaagaagaagctaaaaaacttttcccgaaaggagtcttcaccaaagagctcccatctggcaagaaatacctccgctacacaccccagccttaagtctcttggagaagctggtgctgtgagccagaggatgtcag

SEQ ID NO: 1210 - DNA, 209 bp, Homo sapiens
  misc_feature 1: n = A,T,C or G
nctggctttctacacacaccactgtccaggtgggaagggcagccactgctgctcctgcattcacccaaggaaacaaaggaaaggtgcggcgaggcagggtggggtgagtaatcagcttgcacttctgagccctggcaaccctaccatcctctcctgctgggctcagattgaatttggggaggtatttattctcatgcccatttcccacc

SEQ ID NO: 1211 - DNA, 427 bp, Homo sapiens
aaaatagatgattataacggggcagagaactttcttttctctgcaagaatgttacatattgtatagataaatgagtgacatttcataccatgtatatatagagatgttctataagtgtgagaaagtatatgctttaatagatactgtaattataagatatttttaattaaatatttttttgtaaatattatgtgtgtgtttttttttaatctatgggaatatttcttttggaaaatcatttttcagctcaattacagagctcttgatatcttgaatgtcttttctgtttggcctggctcttaatttgcttttgttttgcccagtatagactcggaagtaacagttatagctagtggtcttgcatgattgcatgagatgtttaatcacaaattaaacttgttctgagtccattcaaatgtgttttttt

SEQ ID NO: 1212 - DNA, 386 bp, Homo sapiens
aaaatcttgcatggcattaattgttccttgcttttatagttgtattttgtacattttggatttctttatataaggtcatagattcttgagctgttgtggtttttagtgcacttaatattagcttgcttaaggcatacttttaatcaagtagaacaaaaactattatcaccaggatttatacatacagagattgtagtatttagtatatgaaatattttgaatacacatctctgtcagtgtgaaaattcagcggcagtgtgtccatcatattaaaaatatacaagctacagttgtccagatcactgaattggaacttttctcctgcatgtgtatatatgtcaaattgtcagcatgacaaaagtgacagatgttatttttgtattttt

SEQ ID NO: 1213 - DNA, 680 bp, Homo sapiens
  misc_feature 1, 646, 668: n = A,T,C or G
nctgataccacacattgaaaggtaaacattaatatttcaaatctgatgtctaactaaaaatgtacagaatgaaaactagaaaatttcaaccccagattatcttcaaccttgctccctccaccaatcatactttgacatttatctatttccttctccacttatggatgtaattggcttgctatagaaactacagttcagatgctttgaatgtatgaactacaatgaacaataaagtcctcttcttttgaagcatattttggcttcagctttaagataatcttatgacaagaagggtcacactgattcacttaataaattccattcttacctaacacaaggtttagttgataagcacttggacaaaaataatacttttcaaaaatgtaaagcaaactagtgaggacaaaggattttgtcctcatctcaacaatgatcagctattggaactgcatgaaactgaacaatttaaacctggagctggtaatgttcttaagaccaattcagaacaaaggcaggttgcccttaaaacaggtttgaccttttccttcactcttcctcctgtcccaccctctgtgagtgatttaaaaacggaaaaggtcaaagcccagccaggcctacatttagagaaattttaaaaaaatttttnctttcaatttttggacctcggncgcgacccccgc

SEQ ID NO: 1214 - DNA, 77 bp, Homo sapiens
  misc_feature 65: n = A,T,C or G
gtcatcttttattatgaagacaataaactcaagattttattgtcttcataataaaagatgacacntgcaagggcggc

SEQ ID NO: 1215 - DNA, 332 bp, Homo sapiens
ggtggaatgtgatgttcagcagcaaacttgcaacagactggccttctgtttgttactttcaaaaggcccacatgatacaattagagaattcccaccgcacaaaaaaagttcctaagtatgttaaatatgtcaagctttttaggcttgtcacaaatgattgctttgttttcctaagtcatcaaaatgtatataaattatctagattggataacagtcttgcatgtttatcatgttacaatttaatattccatcctgcccaacccttcctctcccatcctcaaaaaagggccattttatgatgcattgcacaccctctggggaaattgatcttt

SEQ ID NO: 1216 - DNA, 603 bp, Homo sapiens
aaattgcattcttttcaaatttataagtctaagaaaacaaaaccaaataaaagaagccattccaaggagtgcgtatttgccatttgactgcaacaaaaggcccggccacactgagctaaaaggtaatactctcgaccccattcttctaacacagaaaactttctcaggtaaactgtggggttatgagaatccccctaactagaaatgttgatgggaactgagcattgcttgctttcatcaggtgttcttgttgccaaagacatgaacgatactgaggaaaacgacaagagtgagcattcccgccagtaaatcttcaagggtggcatccgtttcaatttatacttggaagtatttttaattaaaaacaatcaataccaaaaagcttttattttgtgggtttaaaagtcacaaatcacagtgggagaatgccaaattgctttagcttggaactactgaagacgcacatagcatttattataaggcctactcttaggcagttcactctcaaagcaatgaaaataatctcaaaccaaacattacagtgggtttgaagcgttcctacgtttcttccgagcaggtcagttttacatttgctacacagca

SEQ ID NO: 1217 - DNA, 777 bp, Homo sapiens
  misc_feature 677, 685, 695, 736, 749, 750, 776: n = A,T,C or G
aaaccaatcttccaggagattaatcaatgaaatttataagttttatcaacgtataaaatttttttcatcttctgggactcatagaatacaatctgtgtttctgaccagttgaggtagttaaaatagggagggcttttctaatttcgtatttgactatttcagaaagaaaggttatcttttactggtgagcacagtcattgctctgcagatgggctaggattcaaagaatataacacagtgttgttatcataaagagtgttgaagtttatttattatagcaccattgagacattttgaaattggaactggtaaaaaaataaaacaaaaagcatttgaattgtatttggtggaacagcaaaaaaagagaagtatcatttttctttgtcaaattatactgtttccaaacattttggaaataaataactggaattttgtcggtcacttgcactggttgacaagattagaacaagaggaacacatatggagttaaattttttttgttgggatttcagatagagtttggtttataaaaagcaaacagggccaacgtccacaccaaattcttgatcaggaccaccaatgtcatagggtgcaatatctacaatagggagtctccagcctttgccgtgttcgatattcaaagactgttttgctccattcccccagtggggtttcgngcaacccnttccttccanaaactggtgtaaggggggaaatttgcttttttccctttcanccctttgaaattnncccctttcattttggaccccccatcnc

SEQ ID NO: 1218 - DNA, 487 bp, Homo sapiens
  misc_feature 7, 24, 41, 42, 433, 439, 457, 467, 480: n = A,T,C or G
aaattgncaagaagaaaattcttngacatttgggggctggnngacatttgggggcaagggttccactgaaaaatcccccaaattcacgctgaggtttcaggtcatggttgctgaggtggaagatgaggtcagggctcttggagattttccaacccaccctagaacttgtttctaaatggctggggaagaggtcagtataggtccccccgttactgcagatgaaggcagaagtcattctctcccccacccctcaacttcttcagagatgtggagataggaggcttcgatctctaattacctacgatctcttaaaaatataaaacacgtgcagttgactttggtacaaaaaagaaaacaaaagaacaacaaaacattctggtccctgtgggttttttccctcacccccacaaaccattatggacctcggcccgcnaccacnctaagggcgaaattccancacacttgcngcccgttactagnggatccc

SEQ ID NO: 1219 - DNA, 553 bp, Homo sapiens
  misc_feature 539: n = A,T,C or G
ttcccctttaatctagatagaaatactctttatcagagatttaaggcactgttttgctaactggtaaataaaaccaaatgtaaatatgtaagaatgtttatttgttgcacataacttttttggtataaaataaatgtagaagttacctgtggaagttgtgctcccattattcttaaactgcagggttgcattccaaaagaactgaaacgaagtctttttagactcagtaggagccttatattcttgaagtcaatactgtaacctcatttctaaggtatacagggttgattctttttctcttaaatcatatgtaacttgcagaagattcagagtcctcagacctctagttcttggaattcctgtaggtttacggtgtatgtgattgtcaagaattaatgacaaaaatgtgtcactgcctacagttctgtgaacactcagaatgtattaatgagctgtttttccatagttttactttagcttaccttgaatactccctgtataatcctctaaaaaggtagcatcggcaagaaagatgaatncgttggaaatacag

SEQ ID NO: 1220 - DNA, 152 bp, Homo sapiens
  misc_feature 1: n = A,T,C or G
ncgcaggagtgcccgcgactgagccgcctcccaccactccactcctccagccaccacccacaatcacaagaagattcccacccctgcctcccatgcctggtcccaagacagtgagacagtctggaaagtgatgtcagaatagcttccaataa

SEQ ID NO: 1221 - DNA, 306 bp, Homo sapiens
ccaggattttcatgaggggccgtagcttgagccaccactgttctttgggaatcctgtgctcaaaatccgtttgcttcttcagctctgccacaggttgaaaaataacgtttcttttgcttattcccagcacacaaatggaatcatcggtggtaaatttttttcctctgccccgggcctccttgagttttgcagtgatccactccatagctctggcagagattttggttccaaagtttctatcaaatggagagggtgccccaccctgctgcatgtgacccagcacgttcttcctgcagtcaaacacgc

SEQ ID NO: 1222 - DNA, 139 bp, Homo sapiens
ctggagcctgagtccgctgcacggagactctggtgtgggtcttgacgaggtggtcagtgaactcctgatagggagacttggtgaatacagtctccttccagaggtcgggggtcaggtagctgtaggtcttagaaatggc

SEQ ID NO: 1223 - DNA, 351 bp, Homo sapiens
  misc_feature 1: n = A,T,C or G
ngcagcatcaggcctggctccaaagcatcgcggagaaagacaacaacctggttcctattggcaagccagcctcagagcactatgatgacgaggaagaagaggatgatgaagatgatgaggatagtgaagaggactcagaggatgatgaggatatgcaggacatggacgagatgaatgactacaatgagtcaccggatgatggagaggtcaatgaggtggacatggaaggcaacgaacaggatcaggaccagtggatgatctaggtagacaaggcagggtggcctcagggagattccaggccagcccaaactaccctgcatcccaacccccaacccctgcccacagaaccag

SEQ ID NO: 1224 - DNA, 132 bp, Homo sapiens
  misc_feature 1: n = A,T,C or G
nggaatttggtataattatggtgggtgattattttttatactgtatgtgccaaagctttactactgtggaaagacaactgttttaataaaagatttacattccgcaaaaaaaaaaaaaaaaaaaaaaaaaaa

SEQ ID NO: 1225 - DNA, 523 bp, Homo sapiens
  misc_feature 411, 443, 462, 485, 492, 494, 501, 513, 515, 519: n = A,T,C or G
ccagaaaggtgacagtggtcttccagggcctcctgggcctccaggtccacctggtgaagtcattcagcctttaccaatcttgtcctccaaaaaaacgagaagacatactgaaggcatgcaagcagatgcagatgataatattcttgattactcggatggaatggaagaaatatttggttccctcaattccctgaaacaagacattgagcatatgaaatttccaatgggtactcagaccaatccagcccgaacttgtaaagacctgcaactcagccatcctgacttcccagatggtgaatattggattgatcctaaccaaggttgctcaggagattccttcaaagtttactgtaatttcacatctggtggtgagacttgcatttatccagacaaaaaatctgagggagtaanaatttcatcattggacctgcccgggcggccgntcgaaagggcgaattccancacacttggcggccgttcttagnggatccnanctcggtnccaaacttgggngnaatnatgg

SEQ ID NO: 1226 - DNA, 531 bp, Homo sapiens
  misc_feature 64, 365, 417, 424, 476, 482, 484, 496, 501, 517, 521, 522: n = A,T,C or G
aaacattacccagcatcattgtttataatcagaaactctggtccttctgtctggtggcacttanagtcttttgtgccataatgcagcagtatggagggaggattttatggagaaatggggatagtcttcatgaccacaaataaataaaggaaaactaagctgcattgtgggttttgaaaaggttattatacttcttaacaattctttttttcagggacttttctagctgtatgactgttacttgaccttctttgaaaagcattcccaaaatgctctattttagatagattaacattaaccaacataattttttttagatcgagtcagcataaatttctaagtcagcctctagtcgtggttcatcnctttccctgcattttatttggtgtttgtctgaagaaaggaaagaggaaagcnaataccnaattgtactatttgtaccaaatctttgggattcattggcaaaaaaattcagngggggngnattattaaatanaaaanaaaaattttgttcctnggtnnaaggctaat

SEQ ID NO: 1227 - DNA, 292 bp, Homo sapiens
aaacttccctctgtggaagatattcaaaagccacaagtggtgcaaatgtttatggtttttatttttcaatttttattttggttttcttacaaaggttgacattttccataacaggtgtaagagtgttgaaaaaaaaattcaaatttttgggggagcgggggaaggagttaatgaaactgtattgcacaatgctctgatcaatccttctttttctcttttgcccacaatttaagcaagtagatgtgcagaagaaatggaaggattcagctttcagttaaaaaagaagaagaag

SEQ ID NO: 1228 - DNA, 340 bp, Homo sapiens
gttcacattgataaagagacggcgagtcgactgaagtctatgattaacactactttgatcatcaccaacataccctacatcatcatggcgctgggtgtgttctttggtttggtttttacctggcttgcatgcaaaggacagggatccatggatgagggaacagcggatgaaagagcacccctcattcgaacctaaacattgcctttgcttggtgaagaaactatgtgagctgtcctgacctggacgatgacgtggggaaacgctccacctccttgcaggcttgttgcctgttgaaagaaggaaaaagacacagcgctggcaagtgataggaacattctgg

SEQ ID NO: 1229 - DNA, 296 bp, Homo sapiens
  misc_feature 286: n = A,T,C or G
ggaaatctgaaatagagtactatgctatgttggctaaaactggtgtccatcactacagtggcaataatattgaactgggcacagcatgcggaaaatactacagagtgtgcacactggctatcattgatccaggtgactctgacatcattagaagcatgccagaacagactggtgaaaagtaaaccttttcacctacaaaatttcacctgcaaaccttaaacctgcaaaattttcctttaataaaatttgcttgttttaaaaacaaaaaaaaaaaaaaaaaaacccntcccgggggg

SEQ ID NO: 1230 - DNA, 90 bp, Homo sapiens
ctaatacgactcactatagggctcgagggccgcccgggcaggtaaaaagttatttatttattctttttttttttttttttttgggaaggg

SEQ ID NO: 1231 - DNA, 284 bp, Homo sapiens
ctgggcgatgtgcgagctgatagtgagcggcagaatcaggagtaccagcggctcatggacatcaagtcgcggctggagcaggagattgccacctaccgcagcctgctcgagggacaggaagatcactacaacaatttgtctgcctccaaggtcctctgaggcagcaggctctggggcttctgctgtcctttggagggtgtcttctgggtagagggatgggaaggaagggacccttacccccggctcttctcctgacctgccaataaaaatttatggtccaaggg

SEQ ID NO: 1232 - DNA, 580 bp, Homo sapiens
  misc_feature 451, 522, 541, 548, 553, 576, 577, 578, 579: n = A,T,C or G
gtcagcctttgaggaaaccggcaagaccaaggaggtgattgacacgggctatggcatcctggaccagaaggcctctggagtcaaatacaccaagtcggacttgcggttaatcgaagtcactgagaccatttgtaagaggctcctggattatagcctgcacaaggagaggaccggcagcaatcgatttgccaagggcatgtcagagacctttgagacattacacaacctggtacacaaaggggtcaaggtggtgatggacatcccctatgagctgtggaacgagacttctgcagaggtggctgacctcaagaagcagtgtgatgtgctggtggaagagtttgaggaggtgatcgaggactggtacaggaaccaccaggaggaagacctgactgaattcctctgcgccaaccacgtgctgaagggaaaagacaccagttgcctggcagagcantggtccggcaagaagggagacacagacctgcccgggcggccgctcgaaagggcgaattccacacactttgnggccgtactaatggatccnactcggncccancttgcgtaatcattggcatactnnnnt

SEQ ID NO: 1233 - DNA, 153 bp, Homo sapiens
aaacttgatccaacctctttgcatcttacaaagttaaacagctaaaagaagtaaaataagaaggcaatgcttgtggaatgtacagtgcatattggcggcgcacgcctcattacgattcgcctgcttgcttctcctgttcaacctgcccggccg

SEQ ID NO: 1234 - DNA, 416 bp, Homo sapiens
ccaaacaagaagacggcagtctctccagaaccacccagggcggcactggtcacagtttcattccagatcgttaaggtgatttgctctgtggctcaggtgacacagtgtgtctggatgcacatgatcacttgactcggtttctatactcaaatatacagatgcagagtgaactcaaacacacaggcattccactgcagagcagatgataacaaaacaagtggctggggacaggggtcattcaacaaccttcatttggtttgcaatgtctgcaggaatctgggtagtgggaccaagacaagtgagcctgctctgtgctagccaggtgtcaccaagtttctgatctacccagctctcttgccagaggtgaagggggtcccctcgctgagttgcgtgtttagaggagccctgctaggtgg

SEQ ID NO: 1235 - DNA, 319 bp, Homo sapiens
ccaggggacccggcctcaggtctgtggaggtgcttcaacagcacgatgctcattctctgtccgtagtgtctccatatactttctcatcttctccaccatccaggagggtaggacaaaggatttcaattcctctagcttcagatccaggcatcctctgtaatcatcactggccgcaaggtcccggatgtcctcctcgatgaggaggtaggccatcttgccccctgttgcccgcatgtgatgctgctcagccagccagtgcttatcctgggggtcagacctgcccgggcggccgctcgagccctatagtgagtcgtattag

SEQ ID NO: 1236 - DNA, 234 bp, Homo sapiens
ctgtggccctgactcactggccctgctggcatttattcagcacatattaaatgacgaaggctttgagtcaacaccatcagtgggtaatcaatctggttgccctccccctaccctgagagagctatcctgcccataaactatcaaaggttagttttaggaccacataagtaaacaagtcatttagataaactacatttctgtgtatctatgccctaagcttttaagagaattcag

SEQ ID NO: 1237 - DNA, 395 bp, Homo sapiens
aaacaaaacaaaaaaaaagtttacaaaagaaaaaaagatacagaaaaagaataacttgcttcatatgtcccaaaaagagaaaaaaataaaggggacaatgccaacatgctcaacaataaaggcttctttttcttatttttttaatacaaaatacaagcaaaggatacacatacttaaaacagagctcaggagcagacacgcagtcctggaaacccttcaataaaagcaaagcaggagtttgttttttctttgtctatgcagatacatacagagactgggatatgtaaaaattaagtatcacaaaagaccatcacacgattctaccaatgcatgttgcatctgtaattcacgaacatggtcaacaaaatcatgttcacttcaaccccatttcattt

SEQ ID NO: 1238 - DNA, 400 bp, Homo sapiens
aaatttaaggataagtaaagtgagagtacaacagccccattcttagttaaaaagaaaagaaaaagacaagagcaagccactgccaccacaggtaccagcacttaaatttgtcagcaggctgaccaaagagtggcctgtctgttggcattcatcggacatggcagctcccttcagctctccagtgagtttcaagttcagagcactttcagtccttgtcttgtttatctattactgaagggtttctaggaaggtttagcagtgcttcaattttcttagcatcattctcaggttcatcttcctgtaaactactttcaattttctcagggaggtgctcagtaacttgtagtctgcctttccactcttccagttttagctcatggagtgcctttcgatccttctg

SEQ ID NO: 1239 - DNA, 243 bp, Homo sapiens
aaaaaagtgacattgctttattactattggcaggtggggcctgcatgaggtggttagtgtgctcaggggatgggtgggctgtggagatgatgacagaaaggctggaaggaaagggggtgggtttgaaggccagggccaaggggtcctcaggtccgcttctgggaagggacagccttgaggaaggagtcatggcaagccatagctaggccaccaatcagattaagaaattctgagaaatctagc

SEQ ID NO: 1240 - DNA, 224 bp, Homo sapiens
ggggttcaggatcccaacctatccttgggggtggaggacacaatggaattcataatgctcccgaagtggttttcggcggggatcgtgaattaggtgtccagcgcgtaacacacagacaccatctggttctctgtgtgagaaggagggggttgcagcacacccgtcatgaataccagctctggagcaggacagacaggttcaaagcctggctccaccccgaccag

SEQ ID NO: 1241 - DNA, 576 bp, Homo sapiens
  misc_feature 476, 496, 499, 504, 523, 548, 558, 572, 573, 576: n = A,T,C or G
ccattttggagtgtgtccattgggtagcaatgtggaaaccaccagggcctttgtggagaaaatggagggggttgagggagtcccaggaggggcttatttgagggcctttgccacttgctcataggcgagctcgatctcctcatcatctggacaggtggaagcgaattcttcccgggcgtaggcattgctcaagtaccgatgcactccccggaaggcctcggggatggtgaatccccggtacttcttacacaccacctgtactatgtgtaactttggcaacaggttgcagttagccagggtgagctcgttgccatccaaaaacttcctctgagagacaccttcatcttcagcactggtttcatccacttcttctgggaggggggatgttaagtaattgtctaaaaccttcagggctttcaggagtcccttctccagattgtcattgagtgctgggtttgaattcttgatgtaggcanaaaaatttggcaaatatgtncancccanaccttgccgggcgggccgntcgaaggcgaaatccacccacttgnggccgtctantggatccaactcgnnccn

SEQ ID NO: 1242 - DNA, 121 bp, Homo sapiens
ctgctgtggtgtcagcgccagtcttggcctcattccgcttggggagtcctgttgaccacgtgcccctgccggtgaaagagtcaggggatggggatgggtgatgtggcggacacagcccacc

SEQ ID NO: 1243 - DNA, 240 bp, Homo sapiens
aaatgaaatttgaaaaccaaatagtaagaaatggaaagagatagttgtaagaatccatttaccaattttacagctaaaaattaaagtgaagtagaaatagcaaaagataacagacaaatatattattttaggtcattaatttatagtgccttatcatcttaagttataaatagaataaggattttgttatataaaaactatcaaaaaagtatcagtgaaaagacatgacctccatgaaat

SEQ ID NO: 1244 - DNA, 314 bp, Homo sapiens
  misc_feature 2, 249: n = A,T,C or G
cnctcctatagggcgaattgggccctctagatgcatgctcgagcggccgcccgggcaggtgtcgtggttcatctctttcacctgcattttatttggtgtttgtctgaagaaaggaaagaggaaagcaaatacgaattgtactatttgtaccaaatctttgggattcattggcaaataatttcagtgtggtgtattattaaatagaaaaaaaaaaattttgtttcctaggttgaaggtctaattgatacntttgacttatgatgaccatttatgcactttcaaatgaatttgctttcaaaataaatgaagagcag

SEQ ID NO: 1245 - DNA, 569 bp, Homo sapiens
  misc_feature 365, 435, 451, 458, 484, 488, 493, 496, 515, 526, 540, 544,563, 567: n = A,T,C or G
ctggtccaggatagcctgcgagtcctcctactgctactccagacttgacatcatatgaatcatactggggagaatagttctgaggaccagtagggcatgattcacagattccaggggggccaggagaaccaggggaccctggttgtcctggaataccagggtcaccatttctcccaggaataccaggagggcctggatctcccttggggccttgaggtccttgaccattaggagggcgagtaggagcagttggaggctgtgggcaaactgcacaacattctccaaatggaatttctgggttggggcagtctaattcttgatcgtcacatattatgtcatcgcagagaacggatcctgagtcacanacacatatttggcatggttctggcttccagacatctctatccgcataggactgaccaagatgggaacatnctccttcaacagcttnctgttgngccaaaataatagtgggatgaagcanaacnagaantanccacctcccttttcacaancttatcatgtntaatataaacttanaatntttgtcaaaaaggaaaaanaaancc

SEQ ID NO: 1246 - DNA, 169 bp, Homo sapiens
ccagaatttccacatgttcacaaaggaagaacttgaagaggttatcaaggacatttaaggaatcctgatcctcagaacttctctgggacaatttcagttctaataatgtccttaaattttatttccagctcctgttccttggaaaatctccattgtatgtgcatttttt

SEQ ID NO: 1247 - DNA, 280 bp, Homo sapiens
aaaaattagcatggcggcacacatcttagctacttggcaggctgaggttccagatctgttgccatcatggccccttcagggtcctgggaaattcctggcttctcctaaatcagggtgaactgggcctccaggatcaggtctggagcaggcccaaatatagtcctggacctgcctggattaggtgccaatgtctgagtctgggctccagatcaactccagaccccaggctggatctggccccatttgagttctgattccccttggagctgggctctgggcc

SEQ ID NO: 1248 - DNA, 577 bp, Homo sapiens
  misc_feature 501, 519, 523, 530, 573, 576, 577: n = A,T,C or G
aaaagctttatttccccccataatttgcaaatagatttcatgttagttccactggaagttttcttcgtacagttgcctttctcattgactatgctgttggtggggaaaactgctttctcatgaggggaagggttagatttcatagagatgctctgagctaatcacataaacaagagggtttgacctggcagcctctgaggcagtcaaggaggtcaagaaatcctttcagctaaaggcctagtcaggtgggactagttgccaggatcctctctgcagaactgcccaaacgtagctctctttgaccaggaagcctggaagtcagaccatcttctcaggccctgccaaattcccatcctcagtcctgtggcctcatgcgggaacattttatccaagcaaaccactggctttcgccttgaggtccaatgtgcactcttcaccaagtgcaagattgatcttcactccaaagttcaccgttcacacagtttttggcttgtgctttanaagctggctctgcctctnctangaatggnggcatcacagcattggaacacaaagacccagcaagcactggtnggnn

SEQ ID NO: 1249 - DNA, 333 bp, Homo sapiens
ccaggatggtctcaatctcgacctcgtgatccgcccaccttggcctcccaaagtgttgggattacaggcgtgactcaccatgcccagccacttagttttttcttatttccacctttctatcccatagaacactcttttttatcttccctgaaccatattgatgagataaatagggctgggggctgggccccgctggtcactcaacagagtatttcccttggccgagatggaagttttgtcccaatagatgagctgctgagtatcaacaaggtgacatttttctgctacccatttgtgtcctggagacggtggtaccctgaaggcagaggccag

SEQ ID NO: 1250 - DNA, 416 bp, Homo sapiens
aaacatctcacatatacaaaataggtacaatttaatttttctgcttgcccaagaaacaaagcttctgtggaaccatggaagaagatgaaaatgagactggcaaagaacaaatgctgaatctgaagaagaggacaactttgggcaaataatctgcatacttttaattgggaataagatggaaaatatgaatgctaaatcaaattttttaaaaaatacaccacacgatacaactcaatacaggagtatttcttctcaaattcttctagcaccatcaacattcttcaagtatctgaaatactattaattagcacctttgtattatgaacaaaacaaaacaaggacctcagttcatctctgtctaggtcagcacctaacaatgtggatcacactcatgggaaagtgttttgaggtagttt

SEQ ID NO: 1251 - DNA, 223 bp, Homo sapiens
ccacagtgaaaaaggtcatgggtggagagaagcaaagtaggaaggatcatttgaagcacaaacaaatggggaaactgaacagacaatctcagtatcaccacatctgcttcaaaaatagcacaccaactcccttccaaagtgcatcgttacactgcaccatcgtggaagaaatggaagagcaggatggatttggctggctggagtcacatcttggggaagctgg

SEQ ID NO: 1252 - DNA, 447 bp, Homo sapiens
  misc_feature 424, 428, 437, 440: n = A,T,C or G
ctgccagtgggtgcaagcagacctctactaaacgcaaagtagaggaaatggaagtggatgacttctatgatggaatcaaacggctctataatgaagataatgtctcagaaaatgtgggttctgtgtgtggcactgatttatcaagacaagagggacatgcttccccttgtccacctttgcagcctgtttctgtcatgtagtttcaacaagtgctacctttgagtgtaaactaaggtagactactttgggaatgagaacatgcaaaatcaggaaaggctgtagaaggaaatataccttaacaggctgatttggagtgagccagaaaaaaaaaataaaactctcattatttgtgtggctaattataattcagcgttatttaagcacataaagaccaaaaaaaaaaaaaaaaaaaaattcaaaaaancccnctttttttnccncccccgg

SEQ ID NO: 1253 - DNA, 355 bp, Homo sapiens
ccacccactctttgtcaaagctttgcgggagggggccgtacacgtagtgcttctgccacatgataacgagcgcggtgaaaccgatgaagaacatggcaccgcccacaaccgtcttccactcgttcgagcccctgttcatctcagcaaagctctccttgaacttaatgcgatacaactcgactttctcatccatggagaggctgctccaggaggccttctccttctccttcagtgccttctggctggcagacaggtgcttgacatgggccacctccggcaaggggtggtcacgccgatccatataagctgggagcgaaaagtcttcgctcttcacaacactttcatgagctcgtac

SEQ ID NO: 1254 - DNA, 439 bp, Homo sapiens
aaaatgttttatttcatagctcataaaaaagtatgtatgtacaagactcaagtaaatagaaaggcagctttcaatcacaaatcagtttttcagattttactgtggaagcatatttaatgcacacatttgaatgttacacataaataattttaacgatggagtccaagttctggattttacattagatctgcatatataagacacttgtggtcaaatttcaagattggtaaagccagtttcaagctgcttatattttgagtacaggtttcactattacaaatatatgatgttaaactaacaaactcatgaccttcaaagatgtcttcgtcccacgcacacacatttgtaatttgtgtccatttgctatttcccttcttctataatcttcaaattatatagttatgcattgagttccctatgcatctcacccatctccttt

SEQ ID NO: 1255 - DNA, 486 bp, Homo sapiens
  misc_feature 266, 315, 335, 339, 353, 371, 385, 389, 396, 411, 445, 473,475, 482: n = A,T,C or G
aaattcttgcattacacttttctttttaaaccaatcttccaggagattaatcaatgaaatttataagttttatcaacgtataaaatttttttcatcttctgggactcatagaatacaatctgtgtttctgaccagttgaggtagttaaaatagggagggcttttctaatttcgtatttgactatttcagaaagaaaggttatcttttactggtgagcacagtcattgctctgcagatgggctaggattcaaagaatataacacagngttgttatcataaagagtgttgaagtttatttattatagcaccattganacatttttgaaattggaatnggtnaaaaaataaaacanaaagcatttgaattgtanttggtggaacagcntaanaagaganatatccatttttctntgtcaaactatacctgtttccaaacattttgganataaataactgggaattttggcggcccncntggcccntggt

SEQ ID NO: 1256 - DNA, 539 bp, Homo sapiens
  misc_feature 371, 426, 482, 492: n = A,T,C or G
aaattcttgcattacacttttctttttaaaccaatcttccaggagattaatcaatgaaatttataagttttatcaacgtataaaatttttttcatcttctgggactcatagaatacaatctgtgtttctgaccagttgaggtagttaaaatagggagggcttttctaatttcgtatttgactatttcagaaagaaaggttatcttttactggtgagcacagtcattgctctgcagatgggctaggattcaaagaatataacacagtgttgttatcataaagagtgttgaagtttatttattatagcaccattgagacattttgaaattggaattggtaaaaaaataaaacaaaaagcatttgaattgtatntggtggaacagccaaaaaaagagaagtatcatttttctttgtcaaattatactgnttccaaacatttttggaaataaataactggaattttgtcgggcacttgcactgggngacaagattngaaccaagaggaacgcctattggagctaaaatttttttgttgggatt

SEQ ID NO: 1257 - DNA, 583 bp, Homo sapiens
  misc_feature 378, 501, 506, 531, 548, 581, 582: n = A,T,C or G
aaatgtgtacaaattcagaggtttaaaaaacttcgaaagtcacagacacagaatttaggaagctgaaggctgagagtctcccttctcacttaatccatgctttattttgcattcctcacaggtaaggaggcagtgcctgttatgctgtggaccaagaccagccccacggagctgatcttcaaaaaaatggaatttactctggcatactcctatgtatgatacctttccaaggccaaatcccaagagaccagcaagtgcaactttgggcaatgatccaaatctagaattagctgccaaataaccttggtagactagtccctgggtgacaagcatgcttacaagagaaaaaggcagagctctcttccagaaactttcttnctgacattctcgcataatctttgagatctctgctctgtggatgtgcagttttgattttggacaaaacaacaggctctgcttgcttgggggtggaaaatgggcatctttatctttggtttcccnaacanacgctgaggccatgatgacttttgncttgctcttcttccagntggttatcctcttcttactcctttgacccatgnnt

SEQ ID NO: 1258 - DNA, 538 bp, Homo sapiens
  misc_feature 306, 404, 503, 521, 524: n = A,T,C or G
ggcaggtctgtggtacaaatcttggccctctgtgctcagatcttacctcacgttcttcctctattaaatgcatctaagagtgtgtgatggggatggagacaacctattctgggaacccaaaatctatggctctgcattgatttctgtattggaagggtcagtaaattttgtatttctctctgtgtgtctttccattactttactgcagtgaggattttgtgtcatcacgagatgttgaattaatgatagcaggtgatatccttaggaaagactttgtatttcagaaatatgtgaattcaccttttnaagggcataaatccagcttaaccatgaacataatataggacttacatacaattatattccctttttggcaagtggactgattttccaagaatgggttncgatataatttttcaactgaaccagagggtcatggtgacttacatggcagaatgaaaatcaatgtgcacttaataatacaatggaatcagcttttcttngatcactccattccattntanaattcttttctttc

SEQ ID NO: 1259 - DNA, 251 bp, Homo sapiens
aaaatgtttaatttgcaatatacataatactggaattgaaatgctgtctgatggaaatgttgcaatgtggagtaggagggtcaagttcgtgaagatattcttaaaattaatcttggaaactctgtgcctatgaggtttctctaaagtggctaaaatatgcatttaatatgttgtctaaatgagtacatttaattctagagactgtaaggagtagagattatatgctttggggctttttgtagcattttttt

SEQ ID NO: 1260 - DNA, 350 bp, Homo sapiens
ctgcccctccttccacaagtactcaagcctgtttgtaaatactgaaggaattgatggggttgaggaaaggaggtgcatgtgaccagggtcccaaggccacagcttttcagatcctaggaagcaagtggcatttgcttgagttgtggcctcggaaggagaatgtttatctgttttctaactttgctgacaccaggattctccctgtcattgagaagaaagcattatctaattaccttcaggtggtttacttattctgtaaagaatatgtgtaaatattttgtacagagccctgtatcaaataaacagccatatgtggttactaatcacctcttctgtcattccgtccttgg

SEQ ID NO: 1261 - DNA, 435 bp, Homo sapiens
ggacccagttccttaccagcctccctttctctgtcagtggggacgtcatcagccaagctggaagccattaatgaactaattcgttttgaccacatatataccaagcccctagtcttagagataccctctgagacagagagccaagctaatgtggtagtgaaaatcgaggaagcacctctcagcccctcagagaatgatcaccctgaattcattgtctcagtgaaggaagaacctgtagaagatgacctcgttccggagctgggtatctcaaatctgctttcatccagccactgcccaaagccatcttcctgcctactggatgcttacggtgactgtggatacgggggttccctttccccattcagtgacatgtcctctctgcttggtgtaaaccattcttgggaggacacttttgccaatgaactctttccccag

SEQ ID NO: 1262 - DNA, 198 bp, Homo sapiens
ggactgccggtcacacaccagcacgtcccacctcgtgctcacggatttattacacagatagtggcggcaatggcctcagcccagcccaccctcacctgcttttccagcccacaaagggggacgatcacggcccagcaaaagcgatgctgagaggggaaacagtccagagtccaacagcagaacttgggggaagcggtc

SEQ ID NO: 1263 - DNA, 176 bp, Homo sapiens
tgggcattgtgggctacgtggaaacccctcgaggcctccggaccttcaagactgtctttgctgagcacatcagtgatgaatgcaagaggcgtttctataagaattggcataaatctaagaagaaggcctttaccaagtactgcaagaaatggcaggatgaggatggcaagaagcag

SEQ ID NO: 1264 - DNA, 245 bp, Homo sapiens
  misc_feature 167, 193, 200, 201, 206, 210, 217, 225, 231, 233, 236: n = A,T,C or G
ctgtggaggagggtttcagaggagagaggtcggagagcagaggcctgagaagccagaggcaggtggagagagggtggaaagtgagcagcgggctgggctggagccgcacacgctctcctcccatgttaaatagcacctttagaaaaattcacaagtccccatccacnaaaaaaaaaaaaaaaaaaaaaatttncggggannaaaantaanttttaanaaaaaggnaccccntnccnggggggcct

SEQ ID NO: 1265 - DNA, 469 bp, Homo sapiens
ctgaagatagatcgccatcatgaacgacaccgtaactatccgcactagaaagttcatgaccaaccgactacttcagaggaaacaaatggtcattgatgtccttcaccccgggaaggcgacagtgcctaagacagaaattcgggaaaaactagccaaaatgtacaagaccacaccggatgtcatctttgtatttggattcagaactcattttggtggtggcaagacaactggctttggcatgatttatgattccctggattatgcaaagaaaaatgaacccaaacatagacttgcaagacatggcctgtatgagaagaaaaagacctcaagaaagcaacgaaaggaacgcaagaacagaatgaagaaagtcagggggactgcaaaggccaatgttggtgctggcaaaaagtgagctggagattggatcacagccgaaggagtaaaggtgctgcaatgatgttagctgtgg

SEQ ID NO: 1266 - DNA, 547 bp, Homo sapiens
  misc_feature 368, 378, 404, 407, 434, 446, 487, 500, 506, 511, 514, 523,526, 531, 535, 538, 541: n = A,T,C or G
ctgctcggtccagagtaggcttgcgagactgcattctctggatgtcccaatagataacctcaaggagcttggcgtcaggaagcaattgccctcagcaaaccttctggggcaggcacagtcatgagtttgcccacattctgtattcatgataaacagtttgctgtttgatcgtatagactcagtggaatgttggtcacgtcccatgggcctttggctctctgtatatcctcctttctgtttatgtattaattgaaggagtgtaaggccagggtgggcagctctcattttcccattggtggtccatccaactttacagactgtccctggtgctccagtagtttctcagcctcctgtgtggttttcttganttgtccccangttatgggggttgatgtcatgactgnggncggccttctctccgtcttcgcactcangctcagacctgnccgggcggcccgtcgaaaagggcgaattccagcacacttgngggccgttactantggatntctanctngggtccaanttngccgnaatnatnggncataaa

SEQ ID NO: 1267 - DNA, 525 bp, Homo sapiens
  misc_feature 378, 439, 460, 476, 485, 505, 512, 518: n = A,T,C or G
ctgctcggtccagagtaggcttgcgagactgcattctctggatgtcccaatagataacctcaaggagcttggcgtcaggaagcaattgccctcagcaaaccttctggggcaggcacagtcatgagtttgcccacattctgtattcatgataaacagtttgctgtttgatcgtatagactcagtggaatgttggtcacgtcccatgggcctttggctctctgtatatcctcctttctgtttatgtattaattgaaggagtgtaaggccagggtgggcagctctcattttcccattggtggtccatccaactttacagactgtccctggtgctccagtagtttctcagcctcctgtgtggttttcttgagttgtccccangttatgggggttgatgtcatgactgtggtcggccttctctccgtcttcgcactcagctcanacctgcccgggcggccgctcnaaagggcgaattccancacacttgncggccgttactatggatccnagctcgnaccaancttggct

SEQ ID NO: 1268 - DNA, 360 bp, Homo sapiens
ctgattaatcattgttgatgactgcagtttttcccatccttcccgatttacatctgttcaggccaattcaaatatggtgagtaaatgaattagacatgcaaattcaagccccaggctagaaagagggagagagaggaaaagagagagaaagagagagagcgcgcgcatggctgaaatcctaggcgagaagaaagattcttctgcctgatagttattttaatgctctaaaaatcctgcaaatcagaccttcctgtcccttgcaggataactgtaaggctttttaatgtaaggaggcttctggaggaagtgaagagctatggaaacaacacacatagtgtggaaaaatttcacatttttttt

SEQ ID NO: 1269 - DNA, 83 bp, Homo sapiens
ccaattcttcttctcccccccacccaaagacatgtgagcaactgctaatgaaaagcagtaaacagccgcttaggctatagcag

SEQ ID NO: 1270 - DNA, 293 bp, Homo sapiens
  misc_feature 252, 256, 270, 285, 288: n = A,T,C or G
cattattagagcaggaagtacaagcatttaaaatatgtagttcccatatatttcagggtctctgtgtattaagctaactcagatgttttgaaagctttttctttaaacagaggtgaaatatctgtggctaaaaagtttgagatttgtgataactttgtagtcatgtaaaacttaagtgcttcatgcctctccaaatgtggttattctaataaatggagaaatgagctaaaaaaaaaaaaaaaaaaaaaaaancccnccccggggggcccntcaaagggggaaatnccnccccc

SEQ ID NO: 1271 - DNA, 267 bp, Homo sapiens
ctgcaaggggtcaacagctagaatcacgcctttctgaagggcagagtatgctgtaaccacaaacttctaattctgggttctgcaccatcaggaagagaatatcctacaggacagttctccttgtatactgcataaaggactagaatgtggattcatttctgcttgctttttgatccttatggtcctttatgctggcctcaaacttgtcaagcacatgttggcagacattcatgagctcattcaggcctctctgaaatggctcaacag

SEQ ID NO: 1272 - DNA, 580 bp, Homo sapiens
  misc_feature 446, 566: n = A,T,C or G
attccacttgggagggtcaggctgtggccttctggagcaggtggcttgttaaggaacgctagcagggcatggcacgtgagctccggaatagatgtcttcatcacttcttccactgtgtgttgacactgttttccttacctatttcctcagatccccagctttctcctctgctatgcattttcttcacagtgcagcttgcagtccgttgctgaaaatgattataagccctgcataatgttaagctttattgtgattacgtgtatgtttcttctttcttttaagcagacccatacctttccagggtcaaagtacagaatagaatacattgatacaaagtacagaaaaatactttgatttttatccatttcttttactctgtgtaaagactttagaagtctaattcacaggcaaaccaatacagaattgactgcagttgaacagactanaagtatttgtgggaggagtgacatgaagcatgagttatctgattttttttgtagctgctatatattttaagccttcatttgcaattcattgtaacagtgtgtcataaatacacaataaanccatcctgttcaat

SEQ ID NO: 1273 - DNA, 575 bp, Homo sapiens
  misc_feature 467, 555, 575: n = A,T,C or G
aaaataacttaaaaattattgagagtagattttaactattctgcatattattttctttgtgatatatgcatcttctgtcatcttccatgggaaatttgacattgcaacctcacctgaggccatcactttttccttgatgctacgaaccatcctgtcatgtgtttgtaccatatcagtagtgaaactgacagtgctctgataggggtatactcttttatcccaatctatatcccaatacccaatagcccagtattcttagaatccagttgtattcatactctcctggatcatttctgttcctttgtaatatagtccctttcttcccttacaggctcatatgacattaacagacaagacacttttcagaaagacaggtaagtcatttgttaaaatctcactactgttgtttaacagaaacatatatatgcatgtatatgtgtgtcagtatggaaaaagtgggattagangtttatctagaaaagaaaaaattacctctctaagtgcagaaatgaataatacttaaaccatacctacaattctctttatatttcccanataagtcaaaattaaaaaan

SEQ ID NO: 1274 - DNA, 216 bp, Homo sapiens
aaatactgtgtaaaaactttttttacacctaagctgtgtttttgatactgatattttcctatgctgaatagttttcttactttcagggaaggtaagaaaatactttttttatatttgttacttatgtaacattcatatttttctcattttgatatttgtaacatactgtatgctttctacttgtaaatgtcaacaatagaattaaaatatttattt

SEQ ID NO: 1275 - DNA, 74 bp, Homo sapiens
aaattttatttcaaaagcttggatagcttcaatatccaggttgtggcaaaatcaggacacgtgtaaaatacctt

SEQ ID NO: 1276 - DNA, 276 bp, Homo sapiens
aaagtgtttatttttttctataatacatttcattcaaatcataaaagtctgatacatttttttctcaagaacaacttacactcatttgagatgctttttctttcctttaatcttataggatggacaaagatacactttaatggacaaaaaacaccagagttcattacaaatacagcttcccaggccccacctccagcacttctgactgagcgtctgggacgcatcctaggatcgcaaaactgtaaaattcccccagtcaactccacggcaggcagg

SEQ ID NO: 1277 - DNA, 370 bp, Homo sapiens
ccaggctggtgtcgaactcctgggctcaagccattgcccacctcaaagtgctgggattacaagtgtgagccaccacacccaaccaggttatttgaacatttttaagtactgtattttctctattgtaatattgactgtcatctctgtgcaggttttttagtggttgctctaggttgaaacgctttgaattcttaggtatctaagagtgagcattttctttttttgactgctatactctcaccagttgccagcttctcatataaatattgtaaatgctctcgtttaggtaactcagcttctggagttgagggaacttcaaaatcagaagagctctgggaatctgcatttgtgctaagatttagcaaacttt

SEQ ID NO: 1278 - DNA, 586 bp, Homo sapiens
  misc_feature 333, 444, 463, 550, 570, 573, 584, 585: n = A,T,C or G
agaagatcaaacagcgactgtttgagaaccttagaatgctgccgcacgcacctggggtccaaatgcaggcgattcctgaggacgccatccctgaggagagtggcgatgaggacgaagacgaccctgacaagcgcatctcgatctgctcctctgacaaacgaattgcctgtgaggaagagttctccgattctgaagaggagggagaggggggccgcaagaactcttccaacttcaaaaaagccaagagagtcaaaacagaggatgaaaaagagaaagacccagaggagaagaaagaagtcaccgaagaggagaaaaccaaggaggagaagccanaagccaaaggggtcaaggaggaggtcaagttggcctgaatggacctctccagctctggcttcctgctgagtccctcacgtttcttccccaacccctcagattttatatttnctatttctctggggaattnatataaaaatttattaaatataaatatcccccagggacagaaaccaaggcccccagctcagggcagacctgcccggcgggccgttcnaaagggcgaattcagcaccnttncggccgttctnng

SEQ ID NO: 1279 - DNA, 576 bp, Homo sapiens
  misc_feature 519, 537, 550, 563, 566, 571, 575: n = A,T,C or G
agaagatcaaacagcgactgtttgagaaccttagaatgctgccgcacgcacctggggtccaaatgcaggcgattcctgaggacgccatccctgaggagagtggcgatgaggacgaagacgaccctgacaagcgcatctcgatctgctcctctgacaaacgaattgcctgtgaggaagagttctccgattctgaagaggagggagaggggggccgcaagaactcttccaacttcaaaaaagccaagagagtcaaaacagaggatgaaaaagagaaagacccagaggagaagaaagaagtcaccgaagaggagaaaaccaaggaggagaagccagaaccaaaggggtcaaggaggaggtcaagttggcctgaatggacctctccagctctggcttcctgctgagtccctcacgtttcttccccaacccctcagattttatattttctatttctctgggtatttatataaaaatttattaaatataaatttcccagggacagaaaccaagccccgagctcanggcaacctgcccggcggncgttcgaaaggcnattccacacactnggnccgtnctang

SEQ ID NO: 1280 - DNA, 668 bp, Homo sapiens
  misc_feature 13, 42, 264, 522, 530, 554, 559, 567, 594, 602, 605, 616,634, 637, 645: n = A,T,C or G
ccacccctatggnacagggccttgagggagggtgagtgtggnggcggtcttacgtgttcttctcatacctggcaaacagagtgagcacaagccgctggaagccaagcgggaaggcacatctagaagggcagtgagctctggaatgctacaggcacgtgtggatggatgaggctccatggcggccaaggagatatctgctcctgagtaaggtcacctgaccacagacagcaccaggggctggggggctaagaaggagatcttganaaggatggacctgagctaaagatgtaacttagatggtgatctgaaaaaaggaaaaaagaataaacgctggaactcaaatccactgtttagggtacaggagtacacagctaagttccaggtatccagaatcttgtgtccaaatcatagcacaaggagaacaggaattctcttgagttaaggcaaaatcaatcttcacccatctgggctcttccattgcatggtttggaaaggaagggctgggcagagatcattcctctncccatctncccaccttgcccgggcgggccaanggccnaattccanccccacttggcggggccggttacctantgggaatnccnaaccttcggtnccccaaaacctttgggcngtnaattcatngggccattagctggtttccctgt

SEQ ID NO: 1281 - DNA, 402 bp, Homo sapiens
aaagtgacttttagcactaaaatgcctagaagattttactccagacctataaggaaatgtttagtttttatgaaaaatgacaagtcgatggttaaacttctcatgtctttggtgctttggccctaatagcactggacaacaccacgaccacatggaaacatatttttggaagcaaaactttaattttatataacgtatgctatggagagctaagacaatttaaggactacttgttttctattttttttcttaataaaatggaatccactgtgttgaagactcttgatatcatgtgcttgtctaaccattttttgttttataaattagaataaaatatagttgtgataatggcatcgaatggatttgtttggaaagctacatcttatttgtgaaatgtttttt

SEQ ID NO: 1282 - DNA, 143 bp, Homo sapiens
  misc_feature 119, 120, 129, 135, 137: n = A,T,C or G
ctgaggccaaggagtgaaaaacctattactactaagagaaggggtgcagagtgtttacctggtgctctcaacaggacttaacatcaacaggacgtaaaaaaaaaaaaaaaaaaaaaagnntgattccantaaaananttgtgg

SEQ ID NO: 1283 - DNA, 361 bp, Homo sapiens
caattttgctaatagtggcttattcacagatataaataaagtattagcataaatcgtagccttaaaaaagccttttatatgtccttttatatagaattttacatggtcttcaaagaatagtatgtaattgagaaaaagattagaagggaatatgtagaaatagaaagaattatgttagagtgataggattatgtaattttttcttagtattttctcagttcatcaaactttctattataccctgattatactgattatattacctcctacgctgactcaaaatctttttttttcccctcaggtggcgacatgtctaagaatgtgagccagtcacagatggcaaaattgaaccaacaaatgg

SEQ ID NO: 1284 - DNA, 403 bp, Homo sapiens
aaagtgacttttagcactaaaatgcctagaagattttactccagacctataaggaaatgtttagtttttatgaaaaatgacaagtcgatggttaaacttctcatgtctttggtgctttggccctaatagcactggacaacaccacgaccacatggaaacatatttttggaagcaaaactttaattttatataacgtatgctatggagagctaagacaatttaaggactacttgttttctattttttttcttaataaaatggaatccactgtgttgaagactcttgatatcatgtgcttgtctaaccattttttgttttataaattagaataaaatatagttgtgataatggtcatcgaatggatttgtttggaaagctacatcttatttgtgaaatgtttttt

SEQ ID NO: 1285 - DNA, 105 bp, Homo sapiens
caagttttatgatttatttaacttgtggaacaaaaataaaccagattaaccacaaccatgccacctgcccgggcggccctcgagccctatagtgagtcgtattag

SEQ ID NO: 1286 - DNA, 189 bp, Homo sapiens
aaattattatttatagaaagaatctataaattcttggggaagtgtgttataagctttaataattacattgagctgcacctcagtggtgtgtcattaacatgcagtggggttaatatctgaggcctcagatgactttgtgccttttggaataaagggtaaaataaactctcccagagtaagagctgtatc

SEQ ID NO: 1287 - DNA, 568 bp, Homo sapiens
  misc_feature 539, 563: n = A,T,C or G
aaaaacactacttttgcttttttatttaccttttaagacattttcatgcttccaggtaaaaacagatattgtaccatgtacctaatccaaatatcatataaacattttatttatagttaataatctatgatgaaggtaattaaagtagattatggcctttttaagtattgcagtctaaaacttcaaaaactaaaatcattgtcaaaattaatatgattattaatcagaatatcagaatatgattcactatttaaactatgataaattatgataatatatgaggaggcctcgctatagcaaaaatagttaaaatgctgacataacaccaaacttcattttttaaaaaatctgttgttccaaatgtgtataattttaaagtaatttctaaagcagtttattataatggtttgcctgcttaaaaggtataattaaacttcttttctcttctacattgacacacagaaatgtgtcaatgtaaagccaaaaccatcttctgtgtttatggacctgcccgggcgggcgctcgaaagggcgaattncagcacactggcgggcggtactantggat

SEQ ID NO: 1288 - DNA, 248 bp, Homo sapiens
aaaaggtttctttataatgaaaaggttaaaatagctactctgctaccacatcgtccagcagttccacctttagggtcttgaagagatatttgtacacccatgttcacaggagcattattcacaatagccaaaggatggaagcaacattggtgtccatcgacagaccatggataaacaaaacatggtatagacatccaatgaaatattattcagccttaaaaaagaagaaaattgacacatgctacaac

SEQ ID NO: 1289 - DNA, 322 bp, Homo sapiens
aaaccaatcttccaggagattaatcaatgaaatttataagttttatcaacgtataaaatttttttcatcttctgggactcatagaatacaatctgtgtttctgaccagttgaggtagttaaaatagggagggcttttctaatttcgtatttgactatttcagaaagaaaggttatcttttactggtgagcacagtcattgctctgcagatgggctaggattcaaagaatataacacagtgttgttatcataaagagtgttgaagtttatttattatagcaccattgagacattttgaaattggaattggtaaaaaaataaaa

SEQ ID NO: 1290 - DNA, 339 bp, Homo sapiens
cttacataatctttgttttgatatcacagttgtctaattattttactttgtagcttaaggcaggctgaattgttgataaaatggaaaaagtagtatattgttatataagcttctgaggtgtgttttgttgtataagccctggaggttaaaaagtcatcccttatgtatagtagttaaaggcataaaactgtgacttttagatattccacagaaccagacttatttgatgtggataataaccaatgatttagcattttgtttgcttttgttttattttatccgggttcattttttactcttcccatgcacatgaaacaggtggtggcgtgtagagatcag

SEQ ID NO: 1291 - DNA, 189 bp, Homo sapiens
cccgcctcggcctcccaaggtgctgggattacaggcttgagccactgcgcccggccactgctttctctttaagctcctttagaacaaagctgctgtcaaggctcactttcatcagcccctaggacatcccaccagaatagctctccacctccctgcctgttctagtccccaagtccccactgcctgcag

SEQ ID NO: 1292 - DNA, 347 bp, Homo sapiens
  misc_feature 113, 191, 318: n = A,T,C or G
ctgttggaccggcacatttctatgccacaaatgaccactacttctctgatcctttcttaaagtatttagaaacatacttgaacttacactgggcaaatgttgtttactacagnccaaatgaagttaaagtggtagcagaaggatttgattcaggaaatgggatcaatatttcacctgatgataagtatatntatgttgctgacatattggctcatgaaattcatgttttggaaaaacacactaatatgaatttaactcatttgaaggtcttgagctggatacactggtggataattaatctattgatccttcctcggnggacatctgggtaggctgtcatcctaatg

SEQ ID NO: 1293 - DNA, 516 bp, Homo sapiens
aaacagatggagttactgtgaagaagttttcacaactatttatgctggtaaaacaaatgctgttaaatcaccttatgcgtcgttttcaacagcagtggggctaattacccggaatacggtctcaccgatgcagttttcatggacatagaaaattcaaatagaatatataatattgaatttaagatttggggggttaaaaaagaaaacttaactttataaaattatttattctattttaagccttctatcatattttcccatccaattgtttggtttcagtggtccagctttatttacaggcatataaaatgaaattgtgagatgttttgcaagcttctttttactttgagtagcttttaatttgtatgtttttatgtggatgaagagcattttttatgcttttgtgcaataggttccaatatgcatttattagacatctgtttaaatggtaatgtagcatttattttgctaaattgtaagggaacatagatggaattccaaaatatgtacattcag

SEQ ID NO: 1294 - DNA, 157 bp, Homo sapiens
  misc_feature 68: n = A,T,C or G
aaacatctcacatatacaaaataggtacaatttaatttttctgcttgcccaagaaacaaagcttctgnggaaccatggaagaagatgaaaatgagactgacaaagaacaaatgctgaatctgaagaagaggacaactttgggcaaataatctgcata

SEQ ID NO: 1295 - DNA, 473 bp, Homo sapiens
aaaaaaaacccaaaaattaatggctcaagatactacattgctaaagttaggggaaaaaagtaaaaaggctgtgagttctgttgcaagagctcatttgtagacttgcaaaatctaactaattttatattatgcttgttgttagagcagtgctcaaaattacagaagcttcaaattgttatgttttcacaaaatttgctacatatgttgacatgaatgtgtgtcagggaattcatacccaggtaaatgacaattacatcagtatagctaatttttgccaccttgggaggaatggaattctgcctattttcgaattaatcctacagcactcgctaaaaactaacagccatggcaccataatacattttgtgaggtcctagaatattactaatggaaacaaaaaatgtgaggtaaaccgacctttccccaagaaactttgaagccagaaattttacctgcccggggcgggccgctcg

SEQ ID NO: 1296 - DNA, 652 bp, Homo sapiens
  misc_feature 4, 13, 35, 355, 443, 453, 468, 470, 488, 526, 530, 535, 557,573, 576, 577, 585, 588, 594, 597, 598, 609, 612, 618, 632,639: n = A,T,C or G
gctnctacttaanaatgcttcttcctcccccactncttcacttaaggtataagtctacccctaaagtgcatttctcaggcattaaaaacagcactgtgatttgctttccacagagtcctaaataacagccaccttcttcatttgagaggctacagagttcaagctgagctgtgacaggagccagggggccagggccccagaatagctttttgaaaaaaaataattatgccaccctcctccgcggcaggtatcttctcttaccacaaataaatatttaatgcatccttggagtcatgaaatattgagaacccaattgacacttcaatttccagaaaaataaaatcatgaaggcatngtgtaaatattctgaatttggtggaatgagacaacgcgtaagggggcgggcctgaagtctcgggtttggaactgggggtttggggtantgctgggtangcaagtcctggaacncncaggctataccttgcccnggcggcccgctcgaaccctatagtgagtcgtatttaanaaanggcgnaattcccaaccaccacttggcngggccggtttacctangtnngaatcccnaanccttcnggnnacccaaaagcnttngggcgntaaatcattggggncattaancttggttttccct

SEQ ID NO: 1297 - DNA, 324 bp, Homo sapiens
ctgtaggattgccagatttagaaaaaccaaacaatgagaaaaaccagcatgctcagttaaatttgaatttcagacaaacaatgaatgcttttactgtaaatatatgccaaatattgcatgaaacattcttaacgtgaaattgtttctctgaaattcaaacttaactgggcatcttgtacttgatctgacaatcctacaaatagataaatacaaaaaagaaaggagagggggttgtaacccctgccactgttgggtcacacagagactaaaaataaaaacaacacgaataatgaaccaaagagtcactacactggttgctcacac

SEQ ID NO: 1298 - DNA, 567 bp, Homo sapiens
gagaaaggcatgaagtctaccttcaaattcatggcattttagaaggaaaaattgtcgcaagtaatgtgattatacttcctagttttataggtcagaaaaatgaggtccacactaattttgcctcttccacagggagatagattctcatctaccattgtgtcttttgtttctgtttttgtcatgatacctcaaattgatatatgttgtaattatgaatttaaggaagtaaaaaaataactcagggctggagccttcagccatattaacatacattgacataaagacctttgttttaatatgaatgattccagttaacaaatggagaaatagttgtttgaaaattaatatttagcttctcaaaagagactcctgtttggaagcaaattgttggtttaacaggacatactttagatatttgaaaaattctctgtggaatcacaatctcttatttttaagaatgtaggaatatgtgttctatatgcttttaagttatgtattacatactattctctaaaatagaaatgtttatttggcttctaaaaagtcatttgtgagttgatgttattt

SEQ ID NO: 1299 - DNA, 783 bp, Homo sapiens
  misc_feature 626, 640, 649, 655, 661, 670, 702, 712, 714, 720, 731, 744,758, 764, 765: n = A,T,C or G
gctccaccgccggcgcagcagggaaaggcaaaggcaaaggcggctcgggagattcagccgtgaagcaagtgcagatagatggccttgtggtattaaagataatcaaacattatcaagaagaaggacaaggaactgaagttgttcaaggagtgcttttgggtctggttgtagaagatcggcttgaaattaccaactgctttcctttccctcaacacacagaggatgatgctgactttgatgaagtccaatatcagatggaaatgatgcggagccttcgccatgtaaacattgatcatcttcacgtgggctggtatcagtccacatactatggctcattcgttacccgggcactcctggactctcagtttagttaccagcatgccattgaagaatctgtcgttctcatttatgatcccataaaaactgcccaaggatctctctcactaaaggcatacagactgactcctaaactgatggaagtttgtaaagaaaaggatttttcccctgaacattgaaaaaagcaaatatcacctttgagtacatgtttgaagaagtgcccgattgtaattaaaaattcacatcttgatcaatggtcctaatgtgggaaccttgaaaaagaaagtcangaccttcgggccgngaaccaccncttaangggcgnaatttccanccaccacttgggcggggccggttaccttagtnggaattcccnanccttcnggtaccccaancctttggggcggnaaaatcatttgggncattanncttggttttcccctgggg

SEQ ID NO: 1300 - DNA, 324 bp, Homo sapiens
agaacatacagttgagtgggagtaaacaaaaagataaacatgcatgttaatggctgttcgagagaaatcggaataaaagcctaaacaggaacaacttcatcacagtgttgatgttggacacatagatggtgatggcaaaggtttagaacacattattttcaaagactaaatctaaaacccagagtaaacatcaatgctcagagttagcataatttggagctattcaggaattgcagagaaatgcattttcacagaaatcaagatgttatttttgtatactatatcacttagacaactgtgtttcatttgctgtaatcagttttt

SEQ ID NO: 1301 - DNA, 735 bp, Homo sapiens
  misc_feature 177, 419, 442, 542, 552, 572, 618, 625, 633, 651, 652, 662,668, 674, 686, 691, 693, 706, 709, 716, 726: n = A,T,C or G
ctggcattccttcgacttctctccagccgagcttcccagaacatcacatatcactgcaaaaatagcattgcatacatggatcaggccagtggaaatgtaaagaaggccctgaagctgatggggtcaaatgaaggtgaattcaaggctgaaggaaatagcaaattcacctacacagtnctggaggatggttgcacgaaacacactggggaatggagcaaaacagtctttgaatatcgaacacgcaaggctgtgagactacctattgtagatattgcaccctatgacattggtggtcctgatcaagaatttggtgtggacgttggccctgtttgctttttataaaccaaactctatctgaaatcccaacaaaaaaaatttaactccatatgtgttcctcttgttctaatcttgcaaccagngcaagtgaccgacaaaattccangttatttatttccaaaatgtttggaaaacagtataatttgacaaagaaaaaatgataccttctctttttttttgctgttccaccaaatacaattcaaaangcttttttgntttatttttttacccaattncaatttcaaaaatgtctcaatgggggctataataaaataaaacttnacacttnttttattnaaaacaaacactgggggnnatattccttngaaatncctaancccaatcttgcnaaaancnaatgacctggggnttnacccaanaaaaaaaaanaaccctttt

SEQ ID NO: 1302 - DNA, 199 bp, Homo sapiens
aaattatataattttagtgaatcaaagacttataaaattacaattttggttttcacaacatagaaaaaatacaaaaatgactatatatacggttgtacaattttttacccaaatttcaaaggagcagtatgtattgaatttaatgttttataatgttttatctgaaactcagaactgcaagtaatttgcaggttgtacc

SEQ ID NO: 1303 - DNA, 336 bp, Homo sapiens
  misc_feature 302, 306, 313, 319, 324, 331: n = A,T,C or G
ctgggcgatgtgcgagctgatagtgagcggcagaatcaggagtaccagcggctcatggacatcaagtcgcggctggagcaggagattgccacctaccgcagcctgctcgagggacaggaagatcactacaacaatttgtctgcctccaaggtcctctgaggcagcaggctctggggcttctgctgtcctttggagggtgtcttctgggtagagggatgggaaggaagggactcttacccccggctcttctcctgacctgccaataaaaatttatggtccaaggaaaaaaaaaaaaaaaaaancctncccgggnggccgntcaangggcaanttcca

SEQ ID NO: 1304 - DNA, 444 bp, Homo sapiens
ctggaagccaacttgctggcacccccgctccccaacccttcttgcctgggtaggagaggctaaagatcaccctaaatttactcatctctctagtgctgcctcacattgggcctcagcagctccccagcaccaattcacaggtcacccctctcttcttgcactgtccccaaacttgctgtcaattccgagatctaatctccccctacgctctgccaggaattctttcagacctcactagcacaagcccggttgctccttgtcaggagaatttgtagatcattctcacttcaaattcctggggctgatacttctctcatcttgcaccccaacctctgtaaatagatttaccgcatttacggctgcattctgtaagtgggcatggtctcctaatggaggaagtgttcattgtataataaagttattcacctgagtatgcaataaaga

SEQ ID NO: 1305 - DNA, 451 bp, Homo sapiens
  misc_feature 426: n = A,T,C or G
aaaattcacggcaccatggaaatgtagctgaacgtctccagtttccttctttggcaacttctgtattatgcacgtgaagccttcccggagccagcgagcatatgctgcatgaggacctttctatcttacattatggctgggaatcttactctttcatctgataccttgttcagatttcaaaatagttgtagccttatcctggttttacagatgtgaaactttcaagagatttactgactttcctagaatagtttctctactggaaacctgatgcttttataagccattgtgattaggatgactgttacaggcttagctttgtgtgaaaaccagtcacctttctcctaggtaatgagtagtgctgttcatattactttggttctatagcatacttgcatctttaacatgctatcatagtacatttanaatgattgcctttgatttttttttt

SEQ ID NO: 1306 - DNA, 365 bp, Homo sapiens
caaatggtcattgatgtccttcaccccgggaaggcgacagtgcctaagacagaaattcgggaaaaactagccaaaatgtacaagaccacaccggatgtcatcttcgtatttggattcagaactcattttggtggtggcaagacaactggctttggcatgatttatgattccctggattatgcaaagaaaaatgaacccaaacatagacttgcaagacatggcctgtatgagaagaaaaagacctcaggaaagcaacgaaaggaacgcaagaacagaatgaagaaagtcagggggactgcaaaggccaatgttggtgctggcaaaaagccgaaggagtaaaggtgctgcaatgatgttagctgtgg

SEQ ID NO: 1307 - DNA, 263 bp, Homo sapiens
aaaaaaaatgtggaggaaagtagaaatttaccaaggttgttggcccagggcgttaaattcacagatttttttaacgagaaaaacacacagaagaagctacctcaggtgtttttacctcagcaccttgctcttgtgtttcccttagagattttgtaaagctgatagttggagcatttttttatttttttaataaaaatgagttggaaaaaaaataagatatcaactgccagcctggagaaggtgacagtccaagtgtgcaacag

SEQ ID NO: 1308 - DNA, 141 bp, Homo sapiens
  misc_feature 94: n = A,T,C or G
ctgtggccctgggggcaggtgggctctgaggctgcaaacaccctgagtgccagtggtcccagagggggtgaggcctctatctgtacctttattncagccagcctcctggcacagggctgggcccacatcctggcctctgca

SEQ ID NO: 1309 - DNA, 230 bp, Homo sapiens
taggaacacgaagcacgatcagtccatcccagagggaccggagttatgacaagctttccaaatattttgctttaccagccgatatcaacacttgtatctggcctctgtgccccagcagtgccttgtgcaatgtgaatgtgcgcgtctctgctaaaccaccattttatttggtttttgttttgttttggttttgctcggatacttgccaaaatgagactctccgtcggcag

SEQ ID NO: 1310 - DNA, 293 bp, Homo sapiens
  misc_feature 234, 247, 251, 263, 271, 274, 280, 285, 286: n = A,T,C or G
ctgattttatttccttctcaaaaaaagttatttacagaaggtatatatcaacaatctgacaggcagtgaacttgacatgattagctggcatgattttttcttttttttcccccaaacattgtttttgtggccttgaattttaagacaaatattctacacggcatattgcacaggatggatggcaaaaaaaagtttttttgtacaagcttttttttttttttttttttttttttnaaaaaaaaaaccncccnggggggcccttnaaaggggnaantcccanccccnngggggcg

SEQ ID NO: 1311 - DNA, 447 bp, Homo sapiens
  misc_feature 420: n = A,T,C or G
agaaaaagaaggattgatcagagcattgtgtaatacagtttcattaactccttcccccgctcccccaaaaatttgaatttttttttcaacactcttacacctgttatggaaaatgtcaacctttgtaagaaaaccaaaataaaaattgaaaaataaaaaccataaacatttgcaccacttgtggcttttgaatatcttccacagagggaagtttaaaacccaaacttccaaaggtttaaactacctcaaaacactttcccatgagtgtgatccacattgttaggtgctgacctagacagagatgaactgaggtccttgttttgttttgttcataatacaaaggtgctaattaatagtatttcagatacttgaagaatgttgatggtgctagaagaatttgagaagaaatactcctgtatngagttgtatcgtgtgggggtatttttt

SEQ ID NO: 1312 - DNA, 277 bp, Homo sapiens
ccacagttgaggggaactttgccagcattgatgaacggatgaagaagctgggaaagtgagcacatttgggagctggagaacaggggttatccctacccctgtgaactctgttaacagcttacatagggtttcccctttactataactctagcatccccatcccatttgacactgggggcaagggttcttcttgcatgtggggtttatacccctcccctgatgaatacagagtggtagctaggggttggttatcatcagaaggtggtctcccctcagg

SEQ ID NO: 1313 - DNA, 365 bp, Homo sapiens
ctgccgtgccatatcctgcttggcccgctgcagggcggcttccagctcctcctgcttggcacgagcatccttgagcgccagctccccacgctcctcagcctcggcaatggcggcctccaacttggcacgctggttcttgatgttttcgatctcagcctgcagcctctggatggcccggttcatctctgaaatctcattccgggtattccggaggtcgtccccatgcttcccagcctgggcctggagggcctcaaacttggtctggtaccaggcttcagcctcagcccggctgcatttggccatctcctcatactgcgccttgacctcagcgatgatgcccgtccaggtccagggagcgactgttg

SEQ ID NO: 1314 - DNA, 419 bp, Homo sapiens
  misc_feature 3, 15, 364: n = A,T,C or G
gantcacaaatgatnatacttaagtgagcaaaaatgacaagttttactagctaagtagagaaataaatctcagatgcagcgctacaattttcattatcttaagcacattgtacatttctacagaacctgtgattattctcgcatgataaggatggtacttgcatatggtgaattactactgttgacagtttccgcagaaatcctatttcagtggaccaacattgtggcatggcagcaaatgccaacattttgtggaatagcagcaaatctacaagagaccctggttggtttttcgttttgttttctttgttttttcccccttctcctgaatcagcagggatggaaggagggtagggaagttacnaattactccttccagtagtagctctgaagtggcacatttaatatcagtttttttt

SEQ ID NO: 1315 - DNA, 374 bp, Homo sapiens
ccaccaattggatccaggagaaagtgtggctctctcaggaggtggacaaactgagagtgatgttcctggagatgaaaaatgagaaggaaaaactcatgatcaagttccagagccatagaaatatcctagaggagaaccttcggcgctctgacaaggagttagaaaaactagatgacattgttcagcatatttataagaccctgctctctattccagaggtggtgaggggatgcaaagaactacagggattgctggaatttctgagctaagaaactgaaagccagaatctgcttcacctctttttacctgcaatacccccttaccccaataccaagaccaactggcatagagccaactgagataaatgctattta

SEQ ID NO: 1316 - DNA, 341 bp, Homo sapiens
  misc_feature 37, 55, 69, 103, 111, 143, 152, 166, 191: n = A,T,C or G
ccaaatcaggtcataggattcctttttttttttaaanataagtaaatgcatccanaaatgtatgcacanatttaagttttccccatagttttatctgctaggngatagggnggagcttcttagtgcttctgctgggaattcanataggacanacttgcagcctcanaggacacactgcaggtagtgcaaanagacatggaaggaaaacacactgcctgctacatagtttttatcccaggtataatttgtgaggaatgtatagcaaatgtttcttaaagcatgaatcctcttcttgaattcttgtttttatgaaagccatccaactacttactcaatcctct

SEQ ID NO: 1317 - DNA, 311 bp, Homo sapiens; identical to SEQ ID NO: 794

SEQ ID NO: 1318 - DNA, 345 bp, Homo sapiens
aaatataatttaagaacccctccaagcaccggcgtccgtttctgggttccaccaccaactaccgcccttttcactacctcaccccacaccccttcataggacacagcttgggggtcccaggcggggtccggggatgtgggatgaccaaggcactgttctggaaacagacatgatgatgggcccctgtttcaacttgggcaaaggaggccatagtgaaacaggttccctccaacacaaagttatgacaaggacggtagaaaaacaaaacgaagaaacaaaaagggaacggggagaaaaattaagaccaaaaacaaaactcaaaaaccttcaatatgaaggcagcag

SEQ ID NO: 1319 - DNA, 386 bp, Homo sapiens
aaattttatttcaaaagcttggatagcttcaatatccaggttgtggcaaaatcaggacacgtgtaaaataccttacaatacattagattcccaaaaggtaccaaaaagtacagtaaaattaacacttccgttacaggaaatgtatgacgcaaataatataaaattaaaaggtgaaaaaaaggtgacactggtttcctaagatacaatttactctttacaaccagggtccacaggtccaggctgcagagcggcagcaggaagcagagcctcccacctgcttctgggggacctggtaataaaaatcagcccatgatggcgctatggcctctcagacaccacacgctgcctaaacacctagagctctggaaatagtcaacaggagagtg

SEQ ID NO: 1320 - DNA, 241 bp, Homo sapiens
  misc_feature 231: n = A,T,C or G
ctgattttatttccttctcaaaaaaagttatttacagaaggtatatatcaacaatctgacaggcagtgaacttgacatgattagctggcatgattttttcttttttttcccccaaacattgtttttgtggccttgaattttaagacaaatattctacacggcatattgcacaggatggatggcaaaaaaagtttttttgtacaagcttttttttttttttttttttttttnaaaaaaaaac

SEQ ID NO: 1321 - DNA, 358 bp, Homo sapiens
ctggaatgcaaagaaatgtgcacaacccagagctctgtcagccttgccaaaactcaagtgcccccatgggagggtcttgcaacatatgttctgttgagcaaagaggttgcaaaccaagcggttattgcaataaacaccacttgtgacaaacaaagtttgtaagtttaaatttattttttaaaaatgcttgtcttcctcactagacaatcaactctatgagggcagagactatgtcaccactgtcccaccagcccctggcacacagtaggtactcaataaatatatgttggaaggatggatggaggtaatggatggaaagatggatggaaggatgaatggagggatggatgtgacccag

SEQ ID NO: 1322 - DNA, 152 bp, Homo sapiens
aaaaacaaaaacccttaacggaactgccttaaaaaggcagacgtcctagtgcctgtcatgttatattaaacatacatacacacaatctttttgcttattataatacagacttaaatgtacaaagatgttttccacttttttcaatttttaaa

SEQ ID NO: 1323 - DNA, 386 bp, Homo sapiens
  misc_feature 10, 18, 27, 35, 60: n = A,T,C or G
ggcctcaatnactgtaanagaccctcncagcccanaggcgcccactaggaagtcagcagncctagctcggccacacttggtgctcccagcatcccagggagagacacagcccactgaacaaggtctcaggggtattgctaagccaagaaggaactttcccacactactgaatggaagcaggctgtcttgtaaaagcccagatcactgtgggctggagaggagaaggaaagggtctgcgccagccctgtccgtcttcacccatccccaagcctactagagcaagaaaccagttgtaatataaaatgcactgccctactgttggtatgactaccgttacctactgttgtcattgttattacagctatggacctcgggccgcgaccacg

SEQ ID NO: 1324 - DNA, 647 bp, Homo sapiens
  misc_feature 398, 556, 611, 638, 642: n = A,T,C or G
aaaccaatcttccaggagattaatcaatgaaatttataagctttatcaacgtataaaatttttttcatcttctgggactcatagaatacaatctgtgtttctgaccagttgaggtagttaaaatagggagggcttttctaatttcgtatttgactatttcagaaagaaaggttatcttttactggtgagcacagtcattgctctgcagatgggctaggattcaaagaatataacacagtgttgttatcataaagagtgttgaagtttatttattatagcaccattgagacattttgaaattggaattggtaaaaaaataaaacaaaaagcatttgaattgtatttggtggaacagcaaaaaaagagaagtatcatttttctttgtcaaattatactgnttccaaacattttggaaataaataactggaattttgtccggtcacttgcactgggttgacaagattagaaccaagaggaacacatatgggagttaaatttttttacctgccccgggccggcccgcttcgaaaggggcgaattcccagcacacctggcnggcccgttacctaagtgggatccccgagcttcgggtacccaaagcctttggccgntaaatcaatggggccattaagccttgntttnccttg

SEQ ID NO: 1325 - DNA, 547 bp, Homo sapiens
ctgctcttcatttattttgaaagcaaattcatttgaaagtgcataaatggtcatcataagtcaaacgtatcaattagaccttcaacctaggaaacaaaatttttttttttctatttaataacacaccacactgaaattatttgccaatgaatcccaaagatttggtacaaatagtacaattcgtatttgctttcctctttcctttcttcagacaaacaccaaataaaatgcaggtgaaagagatgaaccacgactagaggctgacttagaaatttatgctgactcgatctaaaaaaaattatgttggttaatgttaatctatctaaaatagagcattttgggaatgcttttcaaagaaggtcaagtaacagtcatacagctagaaaagtccctgaaaaaaagaattgttaagaagtataataaccttttcaaaacccacaatgcagcttagttttcctttatttatttgggggtcatgaagactatccccatttctccataaaatcctccctccatactgctgcattatggcccaaaagactctaag

SEQ ID NO: 1326 - DNA, 311 bp, Homo sapiens
ctgcctccccagctctatcccaacctctcccaactataaaactaggcgctgcagcccctgggaccaggcacccccagaatgacctggccgcagtgaggcggattgagaaggagctcccaggaggggcttctgggaagactctggtcaagaagcatcgtgtctggcgttgtggggatgagctttttgttttgtttcttccttttttagttcttcaaagatagggagggaagggggaacatgagcctttgttgctatcaatccaagaacttatttgtacattttttttcaataaaacttttccaatgacattt

SEQ ID NO: 1327 - DNA, 382 bp, Homo sapiens
aaattagagaggttaacaagacagatgattactatgcctcatgtgctgtgtgctctttgaaaggaatgacagcagactacaaagcaaataagatatactgagcctcaacagattgcctgctcctcagagtctctcctatttttgtattacccagctttccttttaatacaaatgttatttatagtttacaatgaatgcactgcataaaaactttgtagcttcattattgtgaaacatattcaagatcctacagtaagagtgaaacattcacaaagatttgcgttaatgaagactacacagaaaacctttctaaggatttgtgtggatcagatacatacttggcaaatttttgagttttacattcttacagaaaagtccattt

SEQ ID NO: 1328 - DNA, 228 bp, Homo sapiens
  misc_feature 207: n = A,T,C or G
aaatgcagaagaagaaacaaaacgaaacaaaaagatcattctgcaaagagacctctcaactcttcatcagccagtggcataactcagaaactgatttaactaatttattatttgagaaaaggggattgaaaaaaattggggggtataatcttctgattcacaattcccagccacattcttttctgtttattctctctcttttttttntttttttttttttttaaaaaa

SEQ ID NO: 1329 - DNA, 261 bp, Homo sapiens
aaacatttcctttgctatgatacaaaggatacttacaaacaaaatattacatatgaccttgttttcgctcttatgttctgacaacttggtaacagcttttaatgcacaatctatacaattaatacaggttatatatgaactataaggtatgctgaaccagaagaatactgacaatatactgtacaataagccttaccagttagtgctgtggaccatttataccaaaaggaaaatgcacatctgtacagtcacctttaccag

SEQ ID NO: 1330 - DNA, 179 bp, Homo sapiens
caggtccaccccggagatgacacgaggctcacatgactctagacacttggtggaaagtgaggcgagaaaaacaatgacttgggccaattacacgactgcaaagctagagctgccaacagggctccagggagcttggcttctgtagaagttctaaggaagcggtacgaactccacggcgg

SEQ ID NO: 1331 - DNA, 322 bp, Homo sapiens
aaaaaaattatgacaagcttcaggtaaaaataatttttaaagggtccatttttcatttacgtacaatcagtacatcttatttacatatatgactggatctttattctattttcttcatataagatattttaactggtaggtaactgccctattctgtttttatagaaagactaaacaccctatttacaggcagttttgatgatgctagtttgtctccaaattacgtactgaatatagttaaaatcttaatgaataacataaaaattaagatccggtattaacagactattttatgggtcacactggatattcaaggagtcag

SEQ ID NO: 1332 - DNA, 741 bp, Homo sapiens
  misc_feature 586, 602, 620, 627, 731, 734: n = A,T,C or G
ggggctgggcccctgctttttgtactaccatcaacatccacttgcgcatctacagaaggctgggccttgagcatggggaatgtggggagggagcaggacacaccagcactgcaaatggcttccttctcccagggcccaaagggatagaaaagaaggcaacatgaagttaaggccctgtgagcagtctagaaggtccttagcagcagcttctctgaaaacatgtgttctgcctctggagaaagggagcagaaaagtggtgcctgctggcttctcctcctcccctggcagcctgaagacaggtgcaaagtcaactagaagacaggcagcctcggggacgtggtcagcgtgcaagcattgatatcctcagtgtgggctgcccgatgcaaggatggctcggaagcgctccggttgatcttcggtagagagtgttggagcagctcaatggaagacaggatctggggaaaaagaggcctctcttcctttactttcttcacacagtcaagctaccagcctcttcattgctttggggcagttcttatatagcttactaagatctggggaggcatatcctcggcccaccatgaanatgatctgatctcggntgttgatgtgagaataangaagctnccccctcatcagttcataccaatacgatgccataaggagtagacatccgactggaaactgaaatgggttggtatcctgcatttcggatcacctctggggccatncanaaggaca

SEQ ID NO: 1333 - DNA, 235 bp, Homo sapiens
tttaaaacccaaacttccaaaggtttaaactacctcaaaacactttcccatgagtgtgatccacattgttaggtgctgacctggacagagatgaactgaggtccttgttttgttttgttcataatacaaaggtgctaattaatagtatttcagatacttgaagaatgttgatggtgctagaagaatttgagaagaaatactcctgtattgagttgtatcgtgtggtgtatttttt

SEQ ID NO: 1334 - DNA, 277 bp, Homo sapiens
ccacttgctgcctaaaccaatcacagcttcagttttgttttttgtcaagtgttggagttacaagtaggcacctctctgtgcctggtattgctcaggttcagacttggctgggggtgagggggccaggcagaaatcagttaagaaggccattccaggtgtaaatgcctcccggctctacagggggtaatatttactgtcgtcttttcccttcccaggttgattactgacctgtttgttgtgaagatgctgctgcaataagcacaaacagaactcatgg

SEQ ID NO: 1335 - DNA, 326 bp, Homo sapiens
ctgtgctcccgactcctccatctcaggtaccaccgactgcactgggcggggccctctggggggaaaggctccacggggcagggatacatctcgaggccagtcatcctctggaggtagcccaatcaggtcaaagattttgcccaactggtcggcttcagagtttccacagaagagaggctttcgacgaaacatctctgcaaagatacagccaacactccacatgtccacaggtgttgcatatgtggactgcagaagaacttcgggagctcggtaccagagtgtaacaaccacgggtgtaagtgccatctggtagctgtagattctgg

SEQ ID NO: 1336 - DNA, 527 bp, Homo sapiens
ctggagaagttacttttattcttgcagttttatactaggaagtcaacatttaataagccatcatccacaattgattaaaaatgtttaatccttaaattgtgcatcaatatcctatgactccaaattttatttatcactctccttcaagtctgaagaaaatgattaatttgctaagttccacagacagtacagtcccactgacataacatttagtatgatgtcctactctcatattagaattaaggacagccagtatcaaactggcctgaaacctgattgtgttcctggttcagaatacctgtagtaaatctgtaaatccacaccaagacacaacattaaactagggtgtgtatatcttataaaaaccttttcacagtaaaaatcaacattaaaattttaccaaattccaacattatggtttttgaatccaattaagctttcaaaatgcctgattagctgtgaattaattataaataacttcatgtagtttgcccagcatttcaaaatggttatggactatcatgttt

SEQ ID NO: 1337 - DNA, 625 bp, Homo sapiens
  misc_feature 385, 583, 610: n = A,T,C or G
gtggtagagagctgccaggctttgtgaattacaggacatttgagacaatcgtgaaacagcaaatcaaggcactggaagagccggctgtggatatgctacacaccgtgacggatatggtccggcttgctttcacagatgtttcgataaaaaattttgaagagttttttaacctccacagaaccgccaagtccaaaattgaagacattagagcagaacaagagagagaaggtgagaagctgatccgcctccacttccagatggaacagattgtctactgccaggaccaggtatacaggggtgcattgcagaaggtcagagagaaggagctggaagaagaaaagaagaagaaatcctgggattttggggctttccaatccagctcggnaacagactcttccatggaggagatctttcagcacctgatggcctatcaccaggaggccagcaagcgcatctccagccacatccctttgatcatccagttcttcatgctccagacgtcggccagccagcttcagaaggccatgctgcagctcctgcaggacaaggacacctacagacctgccccgggcggccgctcgangggcgaattccacacactggcggccgntactagttggatcca

SEQ ID NO: 1338 - DNA, 285 bp, Homo sapiens
ccacaattcaaattaaggcaacaaacatataccttccatgaagcacacacagacttttgaaagcaaggacaatgactgcttgaattgaggccttgaggaatgaagctttgaaggaaaagaatactttgtttccagcccccttcccacactcttcatgtgttaaccactgccttcctggaccttggagccacggtgactgtattacatgttgttatagaaaactgattttagagttctgatcgttcaagagaatgattaaatatacatttcctacacgaaaaaaaa

SEQ ID NO: 1339 - DNA, 335 bp, Homo sapiens
ccaggctggtctcaaaactcctgacctcaggtgatccacccaccctggcctcccaaagtgctgggattacaggcgtgagccagtgcacccgaactgcatttgatttatcctgtgttctttattctttataccattcacaattccccttgtatagccatgatgccatttatgcacttcagcctggggataagccagggttacttaaggaaccaacttcacaaaatctaagccataaagtaagcattcctaataaaacaaattgcaatgtaccattaccttatcactaccaggatcacttagtctctggtgctcaacacataagtggcaaactttgg

SEQ ID NO: 1340 - DNA, 231 bp, Homo sapiens
aaataagtttatgtatacatctgaatgaaaagcaaagctaaatatgtttacagaccaaagtgtgatttcacactgtttttaaatctagcattattcattttgcttcaatcaaaagtggtttcaatattttttttagttggttagaatactttcttcatagtcacattctctcaacctataatttggaatattgttgtggtcttttgttttttctcttagtatagcattttt

SEQ ID NO: 1341 - DNA, 231 bp, Homo sapiens; identical to SEQ ID NO: 1340

SEQ ID NO: 1342 - DNA, 202 bp, Homo sapiens
cagatgcattaggtcttgttgagtatcttaatgagtggcttcagatactcaaaccacttagcgatgaccccacagtatctgcctcacggtggaaaataccaagttcttggagattactctttggcagtggtcttccccctgcacttttctgatctaatttctgttttataccttatacccaaaacacttactaccaacacag

SEQ ID NO: 1343 - DNA, 450 bp, Homo sapiens
  misc_feature 10: n = A,T,C or G
ccgccacatntttattgcatactcaggtgaataacttattatacaatgaacactcctccattaggagaccatgcccacttacagaatgcagccgtaaatgcggtaaatctatttacagaggttggggtgcaagatgagagaagtatcagccccaggaatttgaagtgagaatgatctacaaattctcctgacaaggagcaaccgggcttgtgctagtgaggtctgaaagaattcctggcagagcgtagggggagattagatctcggaattgacagcaagtttggggacagtgcaagaagaggggggtgacctgtgaattggtgctggggagctgctgaggcccaatgtgaggcagcactagagagatgagtaaatttagggtgatctttagcctctcctacccaggcaagaagggttggggagcgggggtgccagcaagttggcttccag

SEQ ID NO: 1344 - DNA, 177 bp, Homo sapiens
ggggcgtccccatggcgactgtggcccggcccctcctctcttgcctgactctcctctcttgcctgactctagacactaacttagttccaggttcggtgccctgttggtgctcctgtttccaatagcttaggtcccatggtgggggaggaacctcaggggctatgcagcccccgccag

SEQ ID NO: 1345 - DNA, 398 bp, Homo sapiens
cctcattccattggctgggctccacctaccagttggtggacatccatgtgacagaaatggagtcatcagtttatcaaccaacaagcagctccagcacccagcacttctacctgaatttcaccatcaccaacctaccatattcccaggacaaagcccagccaggcaccaccaattaccagaggaacaaaaggaatattgaggatgcgctcaaccaactcttccgaaacagcagcatcaagggttatttttctgactgtcaagtttcaacattcaggtctgtccccaacaggcaccacaccggggtggactccctgtgtaacttctcgccactggctcggagagtagacagagttgccatctatgaggaatttctgcggatgacccggaatggtacccag

SEQ ID NO: 1346 - DNA, 483 bp, Homo sapiens
ctggacctccaggtgtaagcggtggtggttatgactttggttacgatggagacttctacagggccgaccagcctcgctcagcaccttctctcagacccaaggactatgaagttgatgctactctgaagtctctcaacaaccagattgagacccttcttactcctgaaggctctagaaagaacccagctcgcacatgccgtgacttgagactcagccacccagagtggagcagtggttactactggattgaccctaaccaaggatgcactatggatgctatcaaagtatactgtgatttctctactggcgaaacctgtatccgggcccaacctgaaaacatcccagccaagaactggtataggagctccaaggacaagaaacacgtctggctaggagaaactatcaatgctggcagccagtttgaatataatgtagaaggagtgacttccaaggaaatggctacccaacttgccttcatgcgcc

SEQ ID NO: 1347 - DNA, 375 bp, Homo sapiens
ctgaggcaggaagctttggagatgagccgtaaccgtattgccgaaaacctgggggatgtccagataagtgacaagatcaccatctcaaagaacttcaaggagaatgtgattcgccctatcctgaaagctcacttccggagggatgagtttctgggacggatcaatgagatcgtctacttcctccccttctgccactcggagctcatccaactcgtcaacaaggaactaaacttctgggccaagagagccaagcaaaggcacaacatcacgctgctctgggaccgcgaggtggcagatgtgctggtcgacggctacaatgtgcactatggcgcccgctccatcaaacatgaggtagaacgccgtgtggtgaaccag

SEQ ID NO: 1348 - DNA, 316 bp, Homo sapiens
ccaactagcaccgagaagtcatattgaactcatttgcagttgtcttggcaattaagcgtattttttcattccagtccaagcacaaatgtggatcactgaacacagtactggaagcgccatttgcaggtacagattgcagtcatcattaaatgagccagaaggcagatactgtttttattttgtgtggggggagggggaagcggcacagtactagcaggagatgaaataaaatgattaggaaacaatgaggttataagatcactgttcttatttgggttaagcaggtcatgttgagaagatggttatttctttcaga

SEQ ID NO: 1349 - DNA, 316 bp, Homo sapiens
ccagagctgcggggcctcagtacacggagctgttccggatgccacagcacagcaccatgctcaggatcatctcgaagatcatgatcacagcgaccacgatggcagcaatgccgatgaggtacagcttcccggagaagaggtcatcgatcttctggtggcagtcctccttgaagaggttgctgatgatgttgctgcccgagggacacaaattgttcttgagcactgaggtggtcaaagcagtcagtgtgctggagccacagcagtcaagcgtctcgtggaaggtcttcaccacagccttggcgttgttggcgtcatc

SEQ ID NO: 1350 - DNA, 225 bp, Homo sapiens
ctgagtggagggtggggacaggtgcaaactggagaggcctagagagctagagaagcaagtaagggccagggccagagtcggcttcaatggaacaacagcccagtgccctaaggcccctaactcttgctggctgtttcttgaccccaagccagggttgggagtcctctgggcatccattttttctaaaggaactggacagagtacacacaggaaaggaagctgtca

SEQ ID NO: 1351 - DNA, 591 bp, Homo sapiens
  misc_feature 415, 441, 464, 515, 516, 526, 536, 556, 558, 566, 568, 581,583: n = A,T,C or G
aaaaagtgtgactgtcagttgtatctgttgcttttctcaatgattcagggatacaaatgggcttctctcattcattaaaagaaaacgcgacatctttctaagattctctgtgggaaaatgactgtcaataaaatgcgggtttctgggccattcgtcttactttcattttttgattacaaatttctcttgacgcacacaattatgtctgctaatcctcttcttcctagagagagaaactgtgctccttcagtgttgctgccataaaggggtttggggaatcgattgtaaaagtcccaggttctaaattaactaaatgtgtacagaaatgaacgtgtaagtaatgtttctacaggtctttgcaacaaactgtcactttcgtctccagcagagggagctgtaggaatagtgcttccanatgtggtcctcccgtgtggggcccancaatgggggcccctgatgccaanagctctggaggttcttgaaagaggggacacgaaggaaggagtgactggganncctccccatnccaaggaggnggggagggtggcctggaaananctgcctcntnccacttttggccntnactggatt

SEQ ID NO: 1352 - DNA, 602 bp, Homo sapiens
  misc_feature 520, 546, 552, 569, 583, 586, 592, 596: n = A,T,C or G
aaaaagtgtgactgtcagttgtatctgttgcttttctcaatgattcagggatacaaatgggcttctctcattcattaaaagaaaacgcgacatctttctaagattctctgtgggaaaatgactgtcaataaaatgcgggtttctgggccattcgtcttactttcattttttgattacaaatttctcttgacgcacacaattatgtctgctaatcctcttcttcctagagagagaaactgtgctccttcagtgttgctgccataaaggggtttggggaatcgattgtaaaagtcccaggttctaaattaactaaatgtgtacagaaatgaacgtgtaagtaatgtttctacaggtctttgcaacaaactgtcactttcgtctccagcagagggagctgtaggaatagtgcttccagatgtggtctcccgtgtggggcccagcaatgggggcccctgatgccaagagctctggaggttcttgaaagaggggacacgaaggaggagtgactgggaagcctccntgccaaggaggtgggaggtgccctgnaaatanctgcctcatccacttanggccatgactgganttnaaatgncagnggtgtg

SEQ ID NO: 1353 - DNA, 449 bp, Homo sapiens
cttcttttagtaactagtataacaagcactggtatttttgtacaaaaaagaaaaacaaaagattgactattgtggtctgcatgacataaacaaacaaatggtgatatcaaagcaacgtataccccagtccagtgtgtgttgccataatttgcaattcagcttaacagtgcacccaatctatatttgcattttgatattatttaagctctatgtacaaggttttgcatgtatttatatggttcttagggaaaaaaaatgctataaactgcaaatctgaaattcaaatgtgttgttccactgagaccagaagaagaagaggagttttaaaagggataatttgttggaaccaataaagctttttgctgatgaacagaaaccaatactgctgtgcactgagaataaaaactcatgcccacttgtaaaaaaaaccccaaaaaaaaaaaaaaaaa

SEQ ID NO: 1354 - DNA, 289 bp, Homo sapiens
caaccaattatcagcaaactctatggaagtgcaggccctcccccaactggtgaagaggatacagcagaaaaagatgagttgtagacactgatctgctagtgctgtaatattgtaaatactggactcaggaacttttgttaggaaaaaattgaaagaacttaagtctcgaatgtaattggaatcttcacctcagagtggagttgaaactgctatagcctaagcggctgtttactgcttttcattagcagttgctcacatgtctttgggtgggggggagaagaagaattgg

SEQ ID NO: 1355 - DNA, 173 bp, Homo sapiens
ctgagaacttcccctctcaggtgcaaagggatggcagagaagtctttccaagagggctcaatccactaagagattatggcttagagaagggaacagctcaaagaagcccttgaagagggtgagggtctggaggactcctgtggtgcaggccatctcccggatagagtgcatgg

SEQ ID NO: 1356 - DNA, 449 bp, Homo sapiens
ccgggcaggtccaagttaatgaggtcacggccagagcggtgggagaactcgactgcatagactagaccatccggaccaacgatgtcagagacatgggagaccgtggtgcccgaggcagccccgaggtagagaaccttagcccccggtttgatgtggatctggtccacaccacccaggattgctgctgctagcttggagcggaaggggttccaggctcggtactcaattttgtcatctccttccgaaatcgagactctcttctctccataaactgattccccagggaccaggttcttggtgaccagtgcatcttcctttcctcgacaaatgaagacaccctcatgccgatgcggctccaccatcacattcttccccgactggtttcctctttttcctccccgaccacgaccccggttgccaccagaatggacctcggcccgcgaccacgc

SEQ ID NO: 1357 - DNA, 302 bp, Homo sapiens
aaatgcttcttttatttcattggttgtacattgggtgagtgaactgaatattacaaccaaaacatagtattgatacaaattagactcctgtttacactgtaaggtaatgaatgagggaattctttaagtgttacagaaagatttagtagaaatgttaccagtggtatggctgaaagaatatttcggtgaagtgctgttatatcctgaaaaccaagagtgaaatgtagttcccatacaagtggagagttagtctcttaactacagtatttgttgaactgatatcttcatgtcttggatattgg

SEQ ID NO: 1358 - DNA, 169 bp, Homo sapiens; identical to SEQ ID NO: 1246

SEQ ID NO: 1359 - DNA, 708 bp, Homo sapiens
  misc_feature 451, 462, 527, 557, 564, 568, 599, 604, 610, 661, 671, 678,683: n = A,T,C or G
acatatccttggaacagaagatcttattgtggaagtgacttccaatgatgctgtgagattttatccctggaccattgataataaatactattcagcagacatcaatctatgtgtggtgccaaacaaatttcttgttactgcagagattgcagaatctgtccaagcatttgtggtttactttgacagcacacaaaaatcgggccttgatagtgtctcctcatggcttccactggcaaaagcatggttacctgaggtgatgatcttggtctgcgatagagtgtctgaagatggtataaaccgacaaaaagctcaagaatggtgcatcaaacatggctttgaattggtagaacttagtccagaggagttgcctgaggaggatgatgacttcccagaatctacaggagtaaagcgaattgtccaagccctgaatgccaatgtgtggtccaatgtngtgatgaagantgataggaaccaaggctttagcccttctcaactcattgactggaacaaaacccatagcattgggncagcagatccttgtcaccagagcaaccccntttgccngcancagatagtcctgaatccctctctgatcatcnggggnggtgcntctacacaacagatgcccacggtggatagcattggggaaccccatgttacnatctgggatnttcaagnaaatnagcccgtcttcccacctgggaagga

SEQ ID NO: 1360 - DNA, 370 bp, Homo sapiens
aaagtttgctaaatcttagcacaaatgcagattcccagagctcttctgattttgaagttccctcaactccagaagctgagttacctaaacgagagcatttacaatatttatatgagaagctggcaactggtgagagtatagcagtcaaaaaaagaaaatgctcactcttagatacctaagaattcaaagcgtttcaacctagagcaaccactaaaaaacctgcacagagatgacagtcaatattacaatagagaaaatacagtacttaaaaatgttcaaataacctggttgggtgtggtggctcacacttgtaatcccagcactttgaggtgggcaatggcttgagcccaggagttcgacaccagcctgg

SEQ ID NO: 1361 - DNA, 172 bp, Homo sapiens
ccagcctgttgcaggctgcttcgtagcgggcgtcggctgcggacttcccttcccgggtctggatcttttcatcctcgagacaggacaagatgaagttcacggcttcttctggggtaaagaccttgaagagcccatcacaggccaacaaaatgaacctgtcattgggggtcag

SEQ ID NO: 1362 - DNA, 172 bp, Homo sapiens; identical to SEQ ID NO: 1361

SEQ ID NO: 1363 - DNA, 162 bp, Homo sapiens; identical to SEQ ID NO: 970

SEQ ID NO: 1364 - DNA, 88 bp, Homo sapiens
ccaaagaagaatcatcctttctactccttctctttcgtctggtcactcagaaatataatattatcagctatgattgttgttgcttgtc

SEQ ID NO: 1365 - DNA, 292 bp, Homo sapiens
  misc_feature 261: n = A,T,C or G
ctgatccagaaggagctcaccattggctcgaagctgcaggatgctgaaattgcaaggctgatggaagacttggaccggaacaaggaccaggaggtgaacttccaggagtatgtcaccttcctgggggccttggctttgatctacaatgaagccctcaagggctgaaaataaatagggaagatggagacaccctctgggggtcctctctgagtcaaatccagtggtgggtaattgtacaataaatttttttggtcaaatgtnaaaaaaaaaaaaaaaaaaaaaaaaaaaaaaa

SEQ ID NO: 1366 - DNA, 711 bp, Homo sapiens
  misc_feature 597, 600, 620, 626, 639, 698, 704: n = A,T,C or G
aaatgtttatggtttttatttttcaatatttattttggttttcttacaaaggttgacattttccataacaggtgtaagagtgttgaaaaaaaaattcaaatttttgggggagcgggggaaggagttaatgaaactgtattgcacaatgctctgatcaatccttctttttctcttttgcccacaatttaagcaagtagatgtgcagaagaaatggaaggattcagctttcagttaaaaaagaagaagaagaaatggcaaagagaaagttttttcaaatttctttcttttttaatttagattgagttcatttatttgaaacagactgggccaatgtccacaaagaattcctggtcagcaccaccgatgtccaaaggtgcaatatcaaggaagggcaggcgtgatggcttatttgttttgtattcaatgattgtctttccccattcatttgtctttttagagcagccatctacaagaacagtgtaagtgaacctgctgttgccctcagcaacaagttcaacatcattagagccctgtagaatgacagcctttttcaggttgcccagtctcctcatccatgtatgcaatgcttgttctttncantggtaggtgaatgttctgangaggcntaatttggaactngcccggggcggcccgctccaaaagggcggaatttccagccccccctgggcgggccgttnctaatnggatccc

SEQ ID NO: 1367 - DNA, 682 bp, Homo sapiens
  misc_feature 583, 616, 625, 631, 640, 649, 673: n = A,T,C or G
ccaggttttagatattaacctggctgcagagccaaaagtgaaccgaggaaaagcaggtgtgaaacgatctgcagcggagatgtacggctcctcttttgacttggactatgactttcaacgggactattatgataggatgtacagttacccagcacgtgtacctcctcctcctcctattgctcgggctgtagtgccctcgaaacgtcagcgtgtatcaggaaacacttcacgaaggggcaaaagtggcttcaattctaagagtggacagcggggatcttccaagtctggaaagttgaaaggagatgaccttcaggccattaagaaggagctgacccagataaaacaaaaagtggattctctcctggaaaacctggaaaaaattgaaaaggaacagagcaaacaagcagtagagatgaagaatgataagtcagaagaggagcagagcagcagctccgtgaagaaagatgagactaatgtgaagatggagtctgaggggggtgcagatgactctgctgaggagggggacctactggatgatgatgataatgaagatcggggggatgaccagacctgcccgggcggncgctccaaaggggcgaattccagcccacttggncggccgttncttggnggaatcccnagcctcggnacccaaccttggggagtaatcatnggccttagc

SEQ ID NO: 1368 - DNA, 468 bp, Homo sapiens
ctgacccacggcatcactgagctgggcccctacaccctggacaggcacagtctctatgtcaatggtttcacccatcagagctctatgacgaccaccagaactcctgatacctccacaatgcgcctgacaacctcgagaactccagcctccctgtctggacctacgaccgccagccctctcctggtgctattcacaattaacttcaccatcactaacctgcggtatgaggagaacatgcatcaccctggctctagaaagtttaacaccacggagagagtccttcagggtctgcttatgcccttgttcaagaacaccagtgtcagctctctgtactctggttgcagactgaccttgctcaggcctgagaaggatggggcagccaccagagtggatgctgtctgcacccatcgtcctgaccccaaaagccctggactggacagagagcggctgtactggaagctgagccag

SEQ ID NO: 1369 - DNA, 390 bp, Homo sapiens
aaatagaattactttattaatctttgaaatcagtaattccaaagggtgcctttaccctggctcatgttgtcaatggcacaccgatttgtctcctctctctaggaaacttgtgatgaatgctcctctttccccctagatcctccgaaaagggaggaacaactttggcggatgatgatgttgaaattttaagcttgtacaaagaaaataaagcttcatactgtaatctggaaaagaagaggaagcaaaatgcaaatagccaaagagcctcttttatatcatctctgtgcagcagcagtaaagggacagagaagacctaagcagtttgggggcatggggcaaagggaaggtaaaagatacaagtgtgctctgacggggtatataatgcatcag

SEQ ID NO: 1370 - DNA, 277 bp, Homo sapiens
cctggactgactgatactacagtgcctcgccgcctgggccccaaaagagctagcagaatccgcaaacttttcaatctctctaaagaagatgatgtccgccagtatgttgtaagaaggcccttaaataaagaaggtaagaaacctaggaccaaagcacccaagattcagcgtcttgttactccacgtgtcctgcagcacaaacggcggcgtattgctctgaagaagcagcgtaccaagaaaaataaagaagaggctgcagaatatgctaaacttttgg

SEQ ID NO: 1371 - DNA, 357 bp, Homo sapiens
  misc_feature 34, 327: n = A,T,C or G
aaaatgatttttaacattatgagagactgctcanattctaagttgttggccttgtgtgtgtgtttttttttaagttctcatcattattacatagactgtgatgtatctttactggaaatgagcccaagcacacatgcatggcatttgttccacaggagggcatccctggggatgtggctggagcatgagccagctctgtcccaggatggtcccagcgggtgctgccaggggcagtgaagtgtttaggtgaaggacaagtaggtaagaggacgccttcaggcaccacagataagcctgaaacagcctctccaagggttttcaccttancaacaatgggagctgtgggagtgattttgg

SEQ ID NO: 1372 - DNA, 176 bp, Homo sapiens
cctatgaccttggccgcagggctattgcttatgccactcacagagacagctattctggaggcgttgtcaatatgtaccacatgaaggaagatggttgggtgaaagtagaaagtacagatgtcagtgacctgctgcaccagtaccgggaagccaatcaataatggtggtggtggcag

SEQ ID NO: 1373 - DNA, 164 bp, Homo sapiens
aaagtttagcatattctgcagcctcttctttatttttcttggtacgctgcttcttcagagcaatacgccgccgtttgtgctgcaggacacgtggagtaacaagacgctgaatcttgggtgctttggtcctaggtttcttaccttctttatttaagggctttctt

SEQ ID NO: 1374 - DNA, 717 bp, Homo sapiens
  misc_feature 586, 669, 683, 692, 694, 698, 704, 706, 715: n = A,T,C or G
ggcagcagaaccactgacagagctagaggagcccattgagaccgtggtcaccaccttcttcacctttgcaaggcaggagggccggaaggatagcctcagcgtcaacgagttcaaagagctggttacccagcagttgccccatctgctcaaggatgtgggctctcttgatgagaagatgaagagcttggatgtgaatcaggactcggagctcaagttcaatgagtactggagattgattggggagctggccagggcagtgtccacctgaacttcctcctcatcggactgaacaacgggggactccccaccctcactgatgtcccgggtggccgagtcggtgcaggtggaggaagaagaaggtggcttggctcttaattctgagggatttggaacctggagggtaatctcattctgacaggtactggattcaggccctaaggcgggggacagcacagtgttctcttctcctccagagttcaggaagacgtccagggcctcctggtccgatatgtccatcaggtccatctgctccagcatgtccacgttcacttccatggatgacatgctgcctatgggctctcgccgntctgcaatctgcacctgcccgggcggccgctcgaaaggcgaaattccagcacactggcggccgtttacttagtgggatcccancttcggtacccaanctttggccntnatcnatgggncnttagcttgntt

SEQ ID NO: 1375 - DNA, 250 bp, Homo sapiens
  misc_feature 226, 245: n = A,T,C or G
tggagaatcagctcagcaggccttggccctcccccgtggacaccaggcagctccactggcctccgggtcagccctcagggccaccgtgatggggtggaggagggttaaataaccatctttacagaaataacagtctcctacagaaagtgcctgagctcagcccatggtccgataacctcatggaaaacaaacaacaaataaaaaaaaaaagtgctgctgacacctntcaaaatctggtggacatnaagct

SEQ ID NO: 1376 - DNA, 594 bp, Homo sapiens
agctcttgacctataaagtataaaaagtaattacaatgaaatattcttcagtaaatctgacactttgggattccaggcaaaaggatcgcttgggtgccaagagttcaagaccagcctggtcaacatagtgagattctatctcaatggatcactgtgtggccgttcagcatcttcctatgctgtgtcaggcaagagaaattctggaaagagagcatctcatgtttattaaggagactgggtgtccttgtagaaagtcctgccatgcacaaccccggtcttaactgatgtgtttcaccatactgaaggcaagttgccatctaacatagttgaaggcgagccagttgtggtgatctttgttcctgcctagtccaatgtgaataacaaaatgaagaatatcaggatgattcgagaccaggaatactacagatgtccaacacttccacctggaatccccaaagaggctcgcttttagcctccacactggttggtgacctgcctctgcagttcactctgctgcttcagatgaaaattttcaggtctgtctgccactgtagtgaagcactgctttgggtagtgtctgtggagaaacttttt

SEQ ID NO: 1377 - DNA, 104 bp, Homo sapiens
ctgtaactgtctatgtacagaaaccggtctgggtgctttggcttacaggttaccttgtgccatacctttgaaacaagggacctgtccaggcttccttctggtgg

SEQ ID NO: 1378 - DNA, 378 bp, Homo sapiens
aaatccaggcttaacattttcgaggctgctgaataatgtagatccttttcagtggaacaaccttttccagagcaggtgtgggtttttgatgcgccatgtgcactgttgctggaaatttatagttgagcttctccagtgcgtcattcagggcatccggtgtctgtattttggcaacatttgcaatggcacttgttttctcgaatcctgtttttttggtatgtctttccaaggtgccaatttcttgttttttggaaattctcattcctccagcttttactgcaggaggatgtccccctttccgaggggagagcaggtcttgcacttcatttgccatagcgtgtgccagtgccagtgccagtgctggtgctctggaggctg

SEQ ID NO: 1379 - DNA, 508 bp, Homo sapiens
ctgcgcctcctgactcgaggacaggccgttggcaccctgaaccaggatgtttccagggtgaaggtctgcatggacaaagttatccacaaatatcatcttcaggagcatgttgatccccagccgtgcaatcttccttttcaagtccacgggaattcctgcctgctggtaactggacacaggcacactctcttcatacgtttccaccaagacttctctggtgacaaaggggcgcagaggggtggggaacttgacggctttcacattccggaagttgacctggaagtgttctagattctgagcttcgtaacgcaggtcaatctgttggaccatcagcttctcaaattcctccacaatctcaggcaagctaagccacttgatgcctggcaaaactcccaggactcggctgccaatcttcgtcagcagcaggtccatatgcacctgagcgagcaggccagggtgcaacactttcactgccacggagatgaggttggtggcctcaggttggtgg

SEQ ID NO: 1380 - DNA, 449 bp, Homo sapiens
  misc_feature 220, 223, 252, 319, 370, 393, 409, 414, 425, 428, 429, 445: n = A,T,C or G
aaaatgaataaaaaattggtttactaaactactggtctccagcaccattttctgttttctgttgtttggatgcaggttcttctttgtctgtttcttctcttgctcttttcacaggtccagttgcaccattttcatcatgttcatcatgttcatcatcactagcaaatttcgttttcttgccctgaaactgtacttttcctttaccagacccaggctgggnagntttattaccctttccttttcctttaaatntacgaccttttgacttccatttgtttagggattcttgttggtcttctattattttcttcagtgcttnttttcccacctctccttctagtacttcccaagtcacacctgcccgggcggnccgctcgaaagggcgaattccancacactggcgggcgtnactantgggatccganctnnggaccaagctttggcntaat

SEQ ID NO: 1381 - DNA, 355 bp, Homo sapiens
aaaatgaataaaaaattggtttactaaactactggtctccagcaccattttctgttttctgttgtttggatgcaggttcttctttgtctgtttcttctcttgctcttttcacaggtccagttgcaccattttcatcatgttcatcatgttcatcatcactagcaaatttcgttttcttgccctgaaactgtacttttcctttaccagacccaggctgggcagctttattaccctttccttttcctttaaatctacgaccttttgacttccatttgtttagggattcttgttggtcttctattattttcttcagtgcttcttttcccacctctccttctagtacttcccaagtcac

SEQ ID NO: 1382 - DNA, 358 bp, Homo sapiens
gcctgttgcaggcaaatgtaaagtctagaaaataatgcaaatgtcatggctactctatatacttttgcttggttcattttttttcccttttagttaagcatgactttagatgggaagcctgtgtatcgtggagaaacaagagaccaactttttcattccctgcccccaatttcccagactagattttaagctaattttctttttctgaagcctctaacaaatgatctagttcagaaggaagcaaaatcccttaatctatgtgcaccgttgggaccaatgccttaattaaagaatttaaaaaagttgtaatagagaatatttttggcattcctctaatgttgtgttttttttttttttg

SEQ ID NO: 1383 - DNA, 460 bp, Homo sapiens
ctggacagtagattacaaagcatctccgatcacgttaaggcagatgatcaatctgtggctgcatctgtaactcctcctgggaaaataatcctgttggagttgggggctcttcccagttgtctggttagttggcccaggaaggggcagtcctgaagctggcgggtggggagccaggccccacctgtcttgtcactgctcgttctgctggccctctgtcactgatgctgatacggagccctggcccttgttgacatcactgatgcacacccactgcccatcaactgactccttccacagggtcaccttattgtctccaccagagacagccaggatgttggctgtgatggaccagctcacatgccacaccacatcgttgaacttgtgcaacaatttaggggaccacgtattgcttgaggcatcatcacaggtccaaatgaacacacgaccatcctgggagcag

SEQ ID NO: 1384 - DNA, 259 bp, Homo sapiens
aaactcacatccatattacacctttcccccctgaaatgtatagaatccatttgtcatcaggaatcaaaacccacagtccattgtgaagtgtgctatatttagaacagtcttaaaatgtacagtgtattttatagaattgaagttaacattcttattttcaagagaatttatggacgttgtagaaatgtacaaatgcatttccaaactgccttaaacgttgtatttttatagacatgttttttaaaaatcctaagttttt

SEQ ID NO: 1385 - DNA, 370 bp, Homo sapiens
  misc_feature 362: n = A,T,C or G
ccaggctggtgtcgaactcctgggctcaagccattgcccacctcaaagtgctgggattacaagtgtgagccaccacacccaaccaggttatttgaacatttttaagtactgtattttctctattgtaatattgactgccatctctgtgcaggttttttagtggttgctctaggttgaaacgctttgaattcttaggtatctaagagtgagcattttctttttttgactgctatactctcaccagttgccagcttctcatataaatattgtaaatgctctcgtttaggtaactcagcttctggagttgagggaacttcaaaatcagaagagctctgggaatctgcatttgtgctaagatttancaaacttt

SEQ ID NO: 1386 - DNA, 292 bp, Homo sapiens
ccaacagagtgaagccctgtctctactgaaaatacaaaaattagccaggtgtggtggtgcatgcctgtaataccagctacttgggaggctaaggcatgagaattgcttgaacccaggaggtggaggctgcagtgagccgagatcacgacactgcactccaggtcctagaatgccacaaaagccccttggaaccttgtcctatgggcggtggctaactcctgaaggtttctgagcaagggggtaacaggacaggcgggcatgtcataaacgtcacctgggacgtgagtggtgg

SEQ ID NO: 1387 - DNA, 181 bp, Homo sapiens
  misc_feature 45, 113: n = A,T,C or G
gttttattttggaccaaaaaaaaaagcaattgaattgttttgtanctggaggcatgggcaaggggggtccccaggtagtaaactccccaggtgggctgagggctagggctgancctcaggtgggtctcctgttcccagtgctaccctgcatagcggcctccttcccaggccctggggcagc

SEQ ID NO: 1388 - DNA, 560 bp, Homo sapiens
  misc_feature 487, 489, 496, 507, 523, 541, 548: n = A,T,C or G
aaagataaggaaagaggctcatagagtttatatcatttgccccaggtcacatagttgaagcggcagagagattagaatgcaactccactctaaagtcctcctgctttcctccaacatcaggcgttccccattgtaccacacccttacatggaaaacaactcttggcggatttatggctctcaggaggagttgatctagcccatccaatgtatgccttttttggagcttgggagtagagaaatctggaccacatttccaagagggcaagtctgatttgtctatttcttctttgtttcagaagaaagacctcaacaggtggcgaaagaagcatagaaggattgaatgctgcctacccgactggtgggctattaatagttcccctaagcatgttctttaatagaaaacggagaaaaatgttgataaacaaaaatgtgcaaacccaatgtgcatgttaatcaatgattccaatttaatcccctaaattctnanacttggncggacccctanggcaattcaccctggngcgtctatgatcactcgncacttgngaaatggctact

SEQ ID NO: 1389 - DNA, 495 bp, Homo sapiens
  misc_feature 399, 453, 472, 482: n = A,T,C or G
ctggctttgcagtcatgcataaaggtgaggacacttaattcaaggcatctgggggctggtgtcaccgcacatgaagagtagtgcccatgctgtcccacgagcttccttgggaaaagggaaaaacaaatcttttcctcaaatagaattgtcgcaggaaagagccatgacatttcattcactgtttaatcatcgggtggcaggatttctttgaagtagaatctggtagtacccctcccaatctttgctggatcacttctaaatggtgaatatactctgtcaaggaatgttctggatcttgagaagcagtcagggatctttctaatcttgaatttggggatggagtggctcttcccccactgtgtggggaggctgctgctgccagtctgcggcctctggcanggtccctggtgtggacctcccggcggccctcaaaggcgaattcaccactgcggncgtctatggatccactcgnccacttgcgnatatgctactgtt

SEQ ID NO: 1390 - DNA, 385 bp, Homo sapiens
aaaggacaagaatccttcaagaaacaggaaaaaactcctaaaacaccaaaaggacctagttctgtagaagacattaaagcaaaaatgcaagcaagtatagaaaaagcgcattgaacagtcctgggcactacatgtaaattaagcccaaagatggggagaaaggaaaaggagagacaaatatagtccatactgagtgtcatcaacaatccagactgaagtcttctattttaatctcaatccccttttctgatttgccacccatgcctcttcaggctggaaacaatctcttggttccctaaagcactttcttctgactgctgtgattcagtgaaccttgccctttgctttctattacttgtgcatttgcctcacctgacaatgtttt

SEQ ID NO: 1391 - DNA, 313 bp, Homo sapiens
aaacttccctctgtggaagatattcaaaagccacaagtggtgcaaatgtttatggtttttatttttcaatttttattttggttttcttacaaaggttgacattttccataacaggtgtaagagtgttgaaaaaaaaattcaaatttttgggggagcgggggaaggagttaatgaaactgtattgcacaatgctctgatcaatccttctttttctcttttgcccacaatttaggcaagtagatgtgcagaagaaatggaaggattcagctttcagttaaaaaagaagaagaagaaatggcaaagagaaagtttt

SEQ ID NO: 1392 - DNA, 155 bp, Homo sapiens
ccaattgaaacaaacagttctgagaccgttcttccaccactgattaagagtggggtggcaggtattagggataatattcatttagccttctgagctttctgggcagacttggtgaccttgccagctccagcagccttcttgtccactgctttgat

SEQ ID NO: 1393 - DNA, 568 bp, Homo sapiens
  misc_feature 483, 488, 492, 504, 519, 524, 534, 535, 540, 554, 557: n = A,T,C or G
aaacatgatagtccataaccattttgaaatgctgggcaaactacatgaagttatttataattaattcacagctaatcaggcattttgaaagcttaattggattcaaaaaccataatgttggaatttggtaaaattttaatgttgatttttactgtgaaaaggtttttataagatatacacaccctagtttaatgttgtgtcttggtgtggatttacagatttactacaggtattctgaaccaggaacacaatcaggtttcaggccagtttgatactggctgtccttaattctaatatgagagtaggacatcatactaaatgttatgtcagtgggactgtactgtctgtggaacttagcaaattaatcattttcttcagacttgaaggagagtgataaataaaatttggagtcataggatattgatgcacaatttaaggattaaacatttttaatcaattgtggatgatggcttattaaatgtnacttnctantttaaactgcanaataaaagtaacttntccanactcggccgnnacacnctaaggggaatccnccnctggcggccgt

SEQ ID NO: 1394 - DNA, 427 bp, Homo sapiens
  misc_feature 404: n = A,T,C or G
cttctgagtacatcatttcatgtcatcctgttggcactgatgaagaacccttacagttcagggttcctggaacttctaccagtgccactctgacaggcctcaccagaggtgccacctacaacatcatagtggaggcactgaaagaccagcagaggcataaggttcgggaagaggttgttaccgtgggcaactctgtcaacgaaggcttgaaccaacctacggatgactcgtgctttgacccctacacagtttcccattatgccgttggagatgagtgggaacgaatgtctgaatcaggctttaaactgttgtgccagtgcttaggctttggaagtggtcatttcagatgtgattcatctagatggtgccatgacaatggtgtgaactacaagattggagagaantgggaccgtcagggagaaaatgg

SEQ ID NO: 1395 - DNA, 644 bp, Homo sapiens
  misc_feature 546, 552, 574, 586, 588, 593, 601, 615, 618, 621, 626, 631,633, 636: n = A,T,C or G
aaagaatcttttagacatctggaagcctttctattcattcctcagtacagtgttccagccatcctgcttgttttttccctccaatacctcccagaacagaaacacttgcatcgagtctgttcctaagaactagttttgaaaaagaagcgatgtacaaaaatatttaacagaactatgaaagatgcaggaaaggagtctttcttcgtagcaaagtagtcgttgctttgcatggtttcttttgtatactcttcagggtttgtttatctgccccatgaataacacagcacctgtaggattatgtcggatgaaaaacagaaaaggtctgtctactataaaccagggaggcgatgatcttgcaatgagaattgcagttgttgctgctgaagctttggttccatcttcactgacttcaatttttgctttttgcaagatatgagaaacatggaggttttctgaccttgttattttgcaaaatttgcctttgatgaatcaaacatgtcaagtaatgccaaaactttcagcgggttccttcaaatctgtttgtgnttcaanacctgcccgggcggccgttcanggggaattccancnccctngcgggcgntctagtggatccanctnggnccaancttgngnaanatggctac

SEQ ID NO: 1396 - DNA, 206 bp, Homo sapiens
caggtgggggaggggcgtcatttcactaggggccgagttttatcatcgtcaccgcactggtgagctttgtactttttcacttctgccatgtacttggcccacgcgtcacctttacttgttaatacctcatcctccgtcttctgcttcttggctactattcccgtcttgagggctagtttgttcccgcctctgcgtttgcccacgaa

SEQ ID NO: 1397 - DNA, 313 bp, Homo sapiens
ctgccaacaccaagattggcccccgccgcatccacacagtccgtgtgcggggaggtaacaagaaataccgtgccctgaggttggacgtggggaatttctcctggggctcagagtgttgtactcgtaaaacaaggatcatcgatgttgtctacaatgcatctaataacgagctggttcgtaccaagaccctggtgaagaattgcatcgtgctcatcgacagcacaccgtaccgacagtggtacgagtcccattatgcgctgcccctgggccgcaagaagggagccaagctgactcctgaggaagaagagatttt

SEQ ID NO: 1398 - DNA, 151 bp, Homo sapiens
ctgggagcatcggcaagctacagccttaaaatctgagctcctcaagtgcacaatttctgtcccttttaagggctcacaacactaaagatttcacatgaaagggtcgtgattgattgagcaatctaggggatatgtgacaggggtttcatgc

SEQ ID NO: 1399 - DNA, 654 bp, Homo sapiens
  misc_feature 17, 406, 420, 431, 441, 476, 488, 515, 517, 522, 538, 542,549, 552, 557, 561, 564, 575, 594, 601, 604, 620, 623, 626,642, 645, 651, 652: n = A,T,C or G
aaagagcttatcctcanaaataagcttcgtcttgagttgttgaactacaaaacactattttctgcagtcatccgaagaattgtgccattacttgtgatgcctctgaatgtggaggctgactctcccgtctctctgtccctcctaccccacggggccgcagcaaaagccatcctgggccttcgactgggccatgtcttcaggaagattcctgaagaggagggcccgaaatacctgcctttataggttcccagagtgccctagaacattcttagatacatattttttaaacaagtaggactccaccttattttctccaatagtccccaagcagtacaggtcacttgaagacataaacattcttcttggttgagggatccacgcccttgtttcagaaatgacaccacanaaggctgtgaactncaggagcatcnttgggatgtnccggatgaaccggggtttaaaggttttctatttcnataaacctgtcncacttgtccgggaatgggggggaaacntnttctntaataggcaccaaccnctantacaaancantggtngccnttnaccacattggngaacttcccggccctaagntgggctngcncaactttaattttatngancanaaaaataaacgttttntcnttggannga

SEQ ID NO: 1400 - DNA, 342 bp, Homo sapiens
ctgctgatacccaggcagtagctgatgctgtcacctaccagctcggtttccacagcattgaactgaatgagcctccactggtccacacagcagccagcctctttaaggagatgtgttaccgataccgggaagacctgatggcgggaatcatcatcgcaggctgggaccctcaagaaggagggcaggtgtacccagtgcctatggggggtatgatggtaaggcagtcctttgccattggaggctccgggagctcctacatctatggctatgttgatgctacctaccgggaaggcatgaccaaggaagagtgtctgcaattcactgccaatgctctcgctttgg

SEQ ID NO: 1401 - DNA, 121 bp, Homo sapiens
ctgaggccaaggagtgaaaaacctattactactaagagaaggggtgcagagtgtttacctggtgctctcaacaggacttaacatcaacaggacgtaaaaaaaaaaaaaaaaaaaaaaaaaa

SEQ ID NO: 1402 - DNA, 391 bp, Homo sapiens
  misc_feature 371: n = A,T,C or G
aaaaataagaaaatacataagaccataacagccaacaggtggcaggaccaggactatagcccaggtcctctgatacccagagcattacgtgagccaggtaatgagggactggaaccagggagaccgagcgctttctggaaaagaggagtttcgaggtagagtttgaaggaggtgagggatgtgaattgcctgcagagagaagcctgttttgttggaaggtttggtgtgtggagatgcagaggtaaaagtgtgagcagtgagttacagcgagaggcagagaaagaagagacaggagggcaagggccatgctgaagggaccttgaagggtaaagaagtttgatattaaaggagttaagagtagcaagttctanagaagaggctggtgctgtgg

SEQ ID NO: 1403 - DNA, 523 bp, Homo sapiens
  misc_feature 358, 382, 429, 457, 458, 463, 473, 482, 489, 498, 499, 506,514: n = A,T,C or G
agcatggtcaccgccatgggttagagccctgctcgatgctcacagggcccccagcgagagtccctgcagtccctttcgacttgcatttttgcaggagcagtatcatgaagcctaaacgcgatggatatatgtttttgaaggcagaaagcaaaattatgtttgccactttgcaaaggagctcactgtggtgtctgtgttccaaccactgaatctggaccccatctgtgaataagccattctgactcatatcccctatttaacagggtctctagtgctgtgaaaaaaaaaaaatgctgaacattgcatataacttatattgtaagaaatactgtacaatgactttattgcatctgggtanctgtaaggcatgaaggatgccaanaatttaaggaatatgggaaaaatagtgtggaaattaaaaaaaacttnggctgattttcaaatggacaaactgccnnttttntttccttttnctggacctncccgggngggccgttnnaaggggnaaattccncccacttgg

SEQ ID NO: 1404 - DNA, 473 bp, Homo sapiens
  misc_feature 344, 446, 458: n = A,T,C or G
ctccaggcgccctcggccgcccatcatggttaattctgtccaacaaacacacacgggtagattgctggcctgttgtaggtggtagggacacagatgaccgacctggtcactcctcctgccaacattcagtctggtatgtggggcgtgcgtgaagcaagaactcctggagctacagggacagggagccatcattcctgcctgggaatcctggaagacttcctgcaggagtcagcgttcaatcttgaccttgaagatgggaaggatgttctttttacgtaccaattcttttgtcttttgatattaaaaagaagtacatgttcattgtagagaatttggaaactgtngaagagaatcaagaagaaaaataaaaatcagacctcggccgcgaccacgctaagggcgaattccacacacttgcgggccgttctatggatcccaacttcggncccaaccttggngtaatcattggcata

SEQ ID NO: 1405 - DNA, 267 bp, Homo sapiens
ccctaacttagatggtttttgaagcctatacaattggtattgttcgacccttaagcttttacatctcttagcatggaggacgaagaaagctgtacattgttgcttgagagtctgtacatttagtccagatttgtatttgcactgtcagtatggcaaatgagtgaaaaatgtttaatacactattggattttttatttcctttttttgattcagcttatacccgggctgaaaacctcaatttatgttcatgacagtggggattttttt

SEQ ID NO: 1406 - DNA, 298 bp, Homo sapiens
tgaaaaccttgaaaactattacctggaggtcaatcaacttgagaagtttgacataaagagcttctgcaagatcctggggccattatcctactccaagatcaagcatttgcgtttggatggcaatcgcatctcagaaaccagtcttccaccggatatgtatgaatgtctacgtgttgctaacgaagtcactcttaattaatatctgtatcctggaacaatattttatggttatgtttttctgtgtgtcagttttcatagtatccatattttattactgtttattacttccatgaatttt

SEQ ID NO: 1407 - DNA, 329 bp, Homo sapiens
gaggcaaattggtttacaccttcatgtaattcttttactttaggggttgtaaagctactttattagatatagaatggcagattctctgatttaaaagggctgagtttgtattattactgatatgaagaatagagtaccaatgtcattaattgatttttcttgttaatcagaattcctattctgtacctttcctctaacttctcagatttgtaattcttcttttgggagctgagctagtgcttttaggagaacagataaatgtggtctcagccagccctagagactgcttcttgtgtttgtgtcattctgtcctgagaaatgaagtcatc

SEQ ID NO: 1408 - DNA, 123 bp, Homo sapiens
tcccaaccctggcttggggtcaagaaacagccagcaagagttaggggccttagggcactgggctgttgttccattgaagccgactctggccctggcccttacttgcttctctagctctctagg

SEQ ID NO: 1409 - DNA, 674 bp, Homo sapiens
  misc_feature 527, 546, 573, 615, 621, 622, 633, 636, 638, 645, 654, 660,667: n = A,T,C or G
cttgtgaaaccctggaaatcttaagtctgttgaaataccaggttaaacacattccaagagatctgttcaaactcaaattcttttgtatacttctgaggtgcctgagaaaaagacttcattatttatgagaaaatatgctttatcttggaaattgtgttcaaatgttagcttactattttgtagaatgaatgtttatgaagctgatatgagaccatctcagaagaaccaagcaggttccttgaccttttgcttgcttttctgaacattgtgaatattacacatgtctttctaaattattctagggtatgcaaatgtcaatggtatgaaacaccactgtctggaagaattaatatattactttagtatgtacctgagctaaatgactgaagctttaggggtgcatagaaaccaccataatttgtatgacattttgaagtgaattaaatatttttgaacatgcttcttcgacagccagtgttatatttttcagaatcaccccaagcacaatggattactcgaaatcagtnttttcaaattacatatttnaaggcatgccaacttgactttcctgtnaaaaatactggctgccaaattattcctttttttttaaacttnggccgnnaacccccttanggngnaattccnccccctggngggccnttcttangggatcc

SEQ ID NO: 1410 - DNA, 570 bp, Homo sapiens
  misc_feature 497, 510, 537, 543, 550, 566: n = A,T,C or G
ccagagcaggagggagacagaggggaggcaccacacactttgaagcaaccagatgtgatgaggactcaatatcaggagaacagcactgagcgggtggtgctaaaccgtttgtgaggactctgccccataatcccatcgcctcccaccagggggcttacatttcaacatgagactcggtgaggacacagatccaaaccacatcaatagtgctttcatgcttttgattatcttttgtaactatgttattgaactataatttacataccatacaattcaccaacgtaaagtgtgtaattcaatggtcttaagcatattcagagttgtgtggccatcgctacagtcaattttaggacatttttatcactgcaaaagaaagacctcaatcttcccattcctcccatcccgaacaaccactaatctacttctctatatggagatttgcttattctggacattttacctgcccgggccggccgctcgaaagggcgaaattccancacacttggcggnccgtactaatgggatcccaacttcgtncccaanctttggngtaatcattgggcatnactt

SEQ ID NO: 1411 - DNA, 226 bp, Homo sapiens
  misc_feature 15, 37, 76, 210: n = A,T,C or G
aaaaaaaaaaagaanaagaaggtttatacacactgtncacacatttacaatggctttggaggatagcagtgctgcnaaaagggcttcaggaggatccggcctgggacaggattgaggtatgttgcagcctccagggcctggggtctcctgcatgaaaaatacccctccccatttgactgtgaactttttggcctggattctggagaacanatttccaggattgtca

SEQ ID NO: 1412 - DNA, 204 bp, Homo sapiens
ctggacgcgcggcctctggtcagtcctggaagtgcttggtgagggcttccagcagctcctgcttcttcagaccactcttcagcccgtaagcccggcaggcctctttcagcatgggcacagtgaacttgcccagcgtacccttgctgatgtgggtcttcagctcctcttctgaatactccaccttgggccttttgcttccagaac

SEQ ID NO: 1413 - DNA, 622 bp, Homo sapiens; identical to SEQ ID NO: 965
  misc_feature 435, 466, 486, 512, 529, 536, 555, 573, 584, 589, 600, 606: n = A,T,C or G

SEQ ID NO: 1414 - DNA, 609 bp, Homo sapiens; identical to SEQ ID NO: 1025
  misc_feature 473, 514, 538, 546, 548, 553, 561, 569, 595, 604: n = A,T,C or G

SEQ ID NO: 1415 - DNA, 390 bp, Homo sapiens; identical to SEQ ID NO: 977

SEQ ID NO: 1416 - DNA, 289 bp, Homo sapiens; identical to SEQ ID NO: 1354

SEQ ID NO: 1417 - DNA, 468 bp, Homo sapiens; identical to SEQ ID NO: 1368

SEQ ID NO: 1418 - DNA, 591 bp, Homo sapiens; identical to SEQ ID NO: 558
  misc_feature 439, 447, 457, 460, 493, 497, 509, 515, 521, 531, 534, 546,548, 555, 575, 581: n = A,T,C or G

SEQ ID NO: 1419 - DNA, 699 bp, Homo sapiens; identical to SEQ ID NO: 297
  misc_feature 663, 676, 689, 693: n = A,T,C or G

SEQ ID NO: 1420 - DNA, 646 bp, Homo sapiens; identical to SEQ ID NO: 315
  misc_feature 416, 429, 433, 434, 440, 446, 472, 490, 492, 493, 544, 568,576, 582, 584, 593, 606, 608, 609, 626, 637, 638, 639: n = A,T,C or G

SEQ ID NO: 1421 - DNA, 364 bp, Homo sapiens; identical to SEQ ID NO: 250
  misc_feature 314, 317, 320, 333, 348, 353: n = A,T,C or G

SEQ ID NO: 1422 - DNA, 668 bp, Homo sapiens; identical to SEQ ID NO: 358
  misc_feature 574, 631, 650, 656: n = A,T,C or G

SEQ ID NO: 1423 - DNA, 632 bp, Homo sapiens; identical to SEQ ID NO: 172
  misc_feature 95, 305, 338, 340, 437, 487, 496, 513, 520, 530, 552, 604: n = A,T,C or G

SEQ ID NO: 1424 - DNA, 318 bp, Homo sapiens; identical to SEQ ID NO: 1005
  misc_feature 175, 237, 248, 249, 250, 275, 278, 311: n = A,T,C or G

SEQ ID NO: 1425 - DNA, 269 bp, Homo sapiens; identical to SEQ ID NO: 70
  misc_feature 119, 168, 190, 205, 206, 219, 227, 230, 244, 248, 253, 254: n = A,T,C or G

SEQ ID NO: 1426 - DNA, 481 bp, Homo sapiens; identical to SEQ ID NO: 889
  misc_feature 397, 408, 474: n = A,T,C or G

SEQ ID NO: 1427 - DNA, 589 bp, Homo sapiens; identical to SEQ ID NO: 532
  misc_feature 362, 394, 408, 441, 446, 450, 510, 522, 530, 537, 545, 546,567, 580, 582: n = A,T,C or G

SEQ ID NO: 1428 - DNA, 176 bp, Homo sapiens; identical to SEQ ID NO: 1263

SEQ ID NO: 1429 - DNA, 628 bp, Homo sapiens; identical to SEQ ID NO: 192
  misc_feature 353, 423, 451, 458, 463, 513, 523, 546, 551, 583, 591, 604,617, 623: n = A,T,C or G

SEQ ID NO: 1430 - DNA, 234 bp, Homo sapiens; identical to SEQ ID NO: 397

SEQ ID NO: 1431 - DNA, 449 bp, Homo sapiens; identical to SEQ ID NO: 1356

SEQ ID NO: 1432 - DNA, 359 bp, Homo sapiens; identical to SEQ ID NO: 556
  misc_feature 198, 269, 283, 312, 345: n = A,T,C or G

SEQ ID NO: 1433 - DNA, 536 bp, Homo sapiens; identical to SEQ ID NO: 142
  misc_feature 526, 529: n = A,T,C or G

SEQ ID NO: 1434 - DNA, 640 bp, Homo sapiens; identical to SEQ ID NO: 341
  misc_feature 640: n = A,T,C or G

SEQ ID NO: 1435 - DNA, 731 bp, Homo sapiens
  misc_feature 523, 600, 622, 633, 644, 702, 708, 710, 714, 723: n = A,T,C or G
cagtgaattgaatacgactcactatagggcgaattgggccctctagatgcatgctcgagcggcccgccagtgtgatggatatctgcagaattcgcccttagcgtggtcgcggccgaggtttttttttggagagaaagcagccagaaaaatccgacttttatttcttaaatactgtgaaggaagaggggggaaacggtcccctgatgaggaagggccatagagcaaagagctaaggatcatcagcaaaggcccgctgggcattggggaagcgctccagcaagtactatgtgactatcattgatgccccaggacacagagactttatcaaaaacatgattacagggacatctcaggctgactgtgctgtcctgattgttgctgctggtgttggtgaatttgaagctggtatctccaagaatgggcagacccgagagcatgcccttctggcttacacactgggtgtgaaacaactaattgtcggtgttaacaaaatggattccactgagccccctacagccagaanagatatgaggaaattgttaaggaagtcagcacttacattaaaaaaattggctacaaccccgacacagtagcatttgngccaatttctggttggaatggngacaacatgcntggaaccaaangctaacatgccttggttcaagggatggaaagtcccccgtaaggatggcaatgcccagngaaccncnctgnttgagggtntggactgg

SEQ ID NO: 1436 - DNA, 638 bp, Homo sapiens; identical to SEQ ID NO: 110
  misc_feature 27, 34, 36, 46, 312, 377, 436, 452, 468, 479, 498, 506, 525,528, 531, 536, 553, 562, 580, 588, 590, 602, 608, 613, 621,622, 635: n = A,T,C or G

SEQ ID NO: 1437 - DNA, 228 bp, Homo sapiens; identical to SEQ ID NO: 208
  misc_feature 18, 70, 75, 100, 105, 108, 110, 119, 125, 128, 135, 137,162, 163, 171, 172, 180, 185, 191, 203, 211, 215, 218: n = A,T,C or G

SEQ ID NO: 1438 - DNA, 286 bp, Homo sapiens; identical to SEQ ID NO: 1145

SEQ ID NO: 1439 - DNA, 274 bp, Homo sapiens; identical to SEQ ID NO: 1206
  misc_feature 1: n = A,T,C or G

SEQ ID NO: 1440 - DNA, 456 bp, Homo sapiens; identical to SEQ ID NO: 1058
  misc_feature 114, 195, 244, 333, 341, 364, 382, 390, 432, 437, 441, 447: n = A,T,C or G

SEQ ID NO: 1441 - DNA, 282 bp, Homo sapiens; identical to SEQ ID NO: 1091

SEQ ID NO: 1442 - DNA, 379 bp, Homo sapiens; identical to SEQ ID NO: 1064
  misc_feature 372: n = A,T,C or G

SEQ ID NO: 1443 - DNA, 494 bp, Homo sapiens; identical to SEQ ID NO: 346
  misc_feature 8, 15, 21: n = A,T,C or G

SEQ ID NO: 1444 - DNA, 271 bp, Homo sapiens; identical to SEQ ID NO: 771

SEQ ID NO: 1445 - DNA, 533 bp, Homo sapiens; identical to SEQ ID NO: 166
  misc_feature 424, 455, 480, 495, 496, 505, 506, 513, 523, 531: n = A,T,C or G

SEQ ID NO: 1446 - DNA, 427 bp, Homo sapiens; identical to SEQ ID NO: 1394
  misc_feature 404: n = A,T,C or G

SEQ ID NO: 1447 - DNA, 275 bp, Homo sapiens; identical to SEQ ID NO: 710

SEQ ID NO: 1448 - DNA, 627 bp, Homo sapiens; identical to SEQ ID NO: 381
  misc_feature 349, 405, 410, 460, 503, 512, 514, 554, 590, 596, 614: n = A,T,C or G

SEQ ID NO: 1449 - DNA, 479 bp, Homo sapiens; identical to SEQ ID NO: 169
  misc_feature 130, 146, 157, 162, 222, 223, 272, 304, 308, 316, 317, 340,342, 349, 378, 405, 409, 423, 433, 434, 438, 446, 449, 467,470: n = A,T,C or G

SEQ ID NO: 1450 - DNA, 291 bp, Homo sapiens; identical to SEQ ID NO: 1186

SEQ ID NO: 1451 - DNA, 370 bp, Homo sapiens; identical to SEQ ID NO: 472
  misc_feature 19, 31, 360: n = A,T,C or G

SEQ ID NO: 1452 - DNA, 595 bp, Homo sapiens; identical to SEQ ID NO: 619
  misc_feature 465, 502, 539, 547, 548, 552, 569, 574, 589: n = A,T,C or G

SEQ ID NO: 1453 - DNA, 698 bp, Homo sapiens; identical to SEQ ID NO: 21
  misc_feature 422, 470, 495, 504, 515, 520, 521, 567, 568, 578, 613, 619,622, 626, 633, 638, 640, 655, 659, 664, 671, 683, 685: n = A,T,C or G

SEQ ID NO: 1454 - DNA, 385 bp, Homo sapiens; identical to SEQ ID NO: 1136
  misc_feature 342: n = A,T,C or G

SEQ ID NO: 1455 - DNA, 550 bp, Homo sapiens; identical to SEQ ID NO: 2
  misc_feature 9, 10, 494, 534: n = A,T,C or G

SEQ ID NO: 1456 - DNA, 479 bp, Homo sapiens; identical to SEQ ID NO: 287

SEQ ID NO: 1457 - DNA, 569 bp, Homo sapiens; identical to SEQ ID NO: 235
  misc_feature 404, 407, 416, 451, 472, 481, 489, 492, 494, 502, 509, 535,538, 540, 551, 560, 564: n = A,T,C or G

SEQ ID NO: 1458 - DNA, 227 bp, Homo sapiens; identical to SEQ ID NO: 433

SEQ ID NO: 1459 - DNA, 577 bp, Homo sapiens; identical to SEQ ID NO: 762
  misc_feature 423, 431, 445, 465, 496, 499, 503, 516, 530, 537: n = A,T,C or G

SEQ ID NO: 1460 - DNA, 470 bp, Homo sapiens; identical to SEQ ID NO: 448
  misc_feature 335, 346, 379, 400, 403, 404, 415, 423, 429, 448, 455, 463: n = A,T,C or G

SEQ ID NO: 1461 - DNA, 211 bp, Homo sapiens; identical to SEQ ID NO: 1094

SEQ ID NO: 1462 - DNA, 465 bp, Homo sapiens; identical to SEQ ID NO: 1023
  misc_feature 433, 450, 451, 452: n = A,T,C or G

SEQ ID NO: 1463 - DNA, 635 bp, Homo sapiens; identical to SEQ ID NO: 947
  misc_feature 494, 514, 526, 536, 545, 553, 555, 562, 591, 605, 623, 627,628: n = A,T,C or G

SEQ ID NO: 1464 - DNA, 234 bp, Homo sapiens; identical to SEQ ID NO: 397

SEQ ID NO: 1465 - DNA, 518 bp, Homo sapiens
  misc_feature 11, 18, 19, 27, 111, 207, 305, 318, 323, 327, 369, 416, 443,449, 460, 464, 468, 478, 507, 509, 512: n = A,T,C or G
tgatttattcngcctccnntttggggngaattggggccctctagatgcattgctcgagcggccgccagtgtgatggatatctgcagaattcgcccttagcgtggtcgcggncgaggtaaacttacgccgcttatgtatttacacataaagttactgtatatataaaaaatattttcaaggactcatgggcttgggaatattcaaaanacattattgctacatttcaatatttacaaaaaaagccacaaaataatttcaaacattaagccactgcaaagaaacatctgatgtaagaaaaaattatnaaaatataaactntcaanaatntccaagacaaaactctcaatgaagtgcccctgaagtacctanacatctataactaacaccacttttcttactatcattgaagtcaatanaaacacaaaggaatttttcagacaaantatggnaaacaacaatntctngggngacaacacanccccaaaatctgtaactttgggaacggtncnaanaggtta

SEQ ID NO: 1466 - DNA, 733 bp, Homo sapiens; identical to SEQ ID NO: 17
  misc_feature 546, 633, 642, 654, 656, 664, 699, 704, 708, 719, 723, 729,733: n = A,T,C or G

SEQ ID NO: 1467 - DNA, 271 bp, Homo sapiens; identical to SEQ ID NO: 983
  misc_feature 171, 237, 243, 248, 259: n = A,T,C or G

SEQ ID NO: 1468 - DNA, 391 bp, Homo sapiens; identical to SEQ ID NO: 563
  misc_feature 97, 174, 352, 355, 356, 362, 383: n = A,T,C or G

SEQ ID NO: 1469 - DNA, 538 bp, Homo sapiens; identical to SEQ ID NO: 288
  misc_feature 1, 130, 352, 379, 402, 443, 477, 501, 510, 530: n = A,T,C or G

SEQ ID NO: 1470 - DNA, 317 bp, Homo sapiens; identical to SEQ ID NO: 1081

SEQ ID NO: 1471 - DNA, 450 bp, Homo sapiens; identical to SEQ ID NO: 215
  misc_feature 350, 399: n = A,T,C or G

SEQ ID NO: 1472 - DNA, 216 bp, Homo sapiens; identical to SEQ ID NO: 911

SEQ ID NO: 1473 - DNA, 219 bp, Homo sapiens; identical to SEQ ID NO: 12

SEQ ID NO: 1474 - DNA, 255 bp, Homo sapiens; identical to SEQ ID NO: 1159
  misc_feature 240, 244, 251: n = A,T,C or G

SEQ ID NO: 1475 - DNA, 655 bp, Homo sapiens; identical to SEQ ID NO: 103
  misc_feature 447, 467, 494, 509, 512, 530, 539, 544, 553, 559, 568, 575,577, 595, 596, 604, 609, 618, 626, 634, 637: n = A,T,C or G

SEQ ID NO: 1476 - DNA, 512 bp, Homo sapiens; identical to SEQ ID NO: 817
  misc_feature 391, 401, 407, 412, 423, 457, 462, 477, 482, 492, 497, 498,507: n = A,T,C or G

SEQ ID NO: 1477 - DNA, 332 bp, Homo sapiens; identical to SEQ ID NO: 253
  misc_feature 271, 279, 280, 299, 309, 313, 321: n = A,T,C or G

SEQ ID NO: 1478 - DNA, 532 bp, Homo sapiens; identical to SEQ ID NO: 903
  misc_feature 310, 354, 369, 426, 433, 439, 449, 476, 481: n = A,T,C or G

SEQ ID NO: 1479 - DNA, 671 bp, Homo sapiens; identical to SEQ ID NO: 836
  misc_feature 17, 448, 459, 478, 480, 526, 535, 549, 560, 568, 569, 581,588, 592, 593, 606, 609, 645, 652: n = A,T,C or G

SEQ ID NO: 1480 - DNA, 483 bp, Homo sapiens; identical to SEQ ID NO: 1346

SEQ ID NO: 1481 - DNA, 453 bp, Homo sapiens; identical to SEQ ID NO: 366
  misc_feature 57, 401, 403, 408, 411, 425, 429, 434, 441: n = A,T,C or G

SEQ ID NO: 1482 - DNA, 542 bp, Homo sapiens; identical to SEQ ID NO: 922
  misc_feature 126, 231, 250, 303, 332, 334, 355, 364, 366, 368, 391, 423,424, 439, 446, 461, 469, 473, 499: n = A,T,C or G

SEQ ID NO: 1483 - DNA, 330 bp, Homo sapiens; identical to SEQ ID NO: 621
  misc_feature 311, 317, 320, 324, 328: n = A,T,C or G

SEQ ID NO: 1484 - DNA, 624 bp, Homo sapiens; identical to SEQ ID NO: 122
  misc_feature 486, 571, 607, 614: n = A,T,C or G

SEQ ID NO: 1485 - DNA, 215 bp, Homo sapiens; identical to SEQ ID NO: 1108
  misc_feature 188, 199, 205, 209: n = A,T,C or G

SEQ ID NO: 1486 - DNA, 271 bp, Homo sapiens; identical to SEQ ID NO: 948

SEQ ID NO: 1487 - DNA, 204 bp, Homo sapiens; identical to SEQ ID NO: 701
  misc_feature 54, 79, 91, 117, 125, 138, 164, 174, 187, 194: n = A,T,C or G

SEQ ID NO: 1488 - DNA, 375 bp, Homo sapiens; identical to SEQ ID NO: 152
  misc_feature 351: n = A,T,C or G

SEQ ID NO: 1489 - DNA, 214 bp, Homo sapiens; identical to SEQ ID NO: 1127
  misc_feature 10, 70, 148, 158, 159, 165, 201, 203: n = A,T,C or G

SEQ ID NO: 1490 - DNA, 322 bp, Homo sapiens; identical to SEQ ID NO: 1165
  misc_feature 43: n = A,T,C or G

SEQ ID NO: 1491 - DNA, 683 bp, Homo sapiens; identical to SEQ ID NO: 285
  misc_feature 452, 604, 605, 626, 642, 661, 681: n = A,T,C or G

SEQ ID NO: 1492 - DNA, 545 bp, Homo sapiens; identical to SEQ ID NO: 662
  misc_feature 332, 344, 346, 386, 418, 427, 431, 444, 476, 494, 498, 508: n = A,T,C or G

SEQ ID NO: 1493 - DNA, 569 bp, Homo sapiens; identical to SEQ ID NO: 1245
  misc_feature 365, 435, 451, 458, 484, 488, 493, 496, 515, 526, 540, 544,563, 567: n = A,T,C or G

SEQ ID NO: 1494 - DNA, 344 bp, Homo sapiens; identical to SEQ ID NO: 756

SEQ ID NO: 1495 - DNA, 501 bp, Homo sapiens; identical to SEQ ID NO: 825
  misc_feature 356, 411, 452, 459, 469, 481, 490: n = A,T,C or G

SEQ ID NO: 1496 - DNA, 344 bp, Homo sapiens; identical to SEQ ID NO: 894

SEQ ID NO: 1497 - DNA, 190 bp, Homo sapiens; identical to SEQ ID NO: 850

SEQ ID NO: 1498 - DNA, 343 bp, Homo sapiens; identical to SEQ ID NO: 723

SEQ ID NO: 1499 - DNA, 693 bp, Homo sapiens; identical to SEQ ID NO: 886
  misc_feature 494, 511, 528, 550, 560, 566, 582, 593, 594, 598, 610, 626,641, 651, 675, 678, 690: n = A,T,C or G

SEQ ID NO: 1500 - DNA, 290 bp, Homo sapiens; identical to SEQ ID NO: 1090

SEQ ID NO: 1501 - DNA, 301 bp, Homo sapiens; identical to SEQ ID NO: 377
  misc_feature 23, 33, 35, 41, 114: n = A,T,C or G

SEQ ID NO: 1502 - DNA, 743 bp, Homo sapiens
  misc_feature 666: n = A,T,C or G
aaaagtcacaaatcacagtgggagaatgccaaattgctttagcttggaactactgaagacgcacatagcatttattataaggcctactcttaggcagttcactctcaaagcaatgaaaataatctcaaaccaaacattacagtgggtttgaagcgttcctacgtttcttccgagcaggtcagttttacatttgctacacagcattccccacgaatgcctggtaattctatacatttgattctttaataaacactaaactaatagatcatagaaaactaaaagcttagagaaggtgcctccagacatatttacataaataacgtagcctcacaagaaagaccaagatctcattagcgtggaatgctttttccacaaggctgggtccatgcctcatttgtcarattaaccccatttgaggagaaatttgagtttgtggttcatgggtttttgaaaaaaaaaaaaaaaaaaaarggaattaagcaacttgtaaaagctcttttgaaattaatctaataacccagtggctcctcggctaagtgcctcagtcctgtctgaaatacagcgggtaagagcctttgtttccatttgacctcttttcaacactttcatctgccctgaccctcatcaggaacaagagggctccccaatccccagggcccggctcanaaggaaggggtgggagagaaggggcgagagggagcagggtgaggggcacagagctgaggctgccaacctgccccggg

SEQ ID NO: 1503 - DNA, 409 bp, Homo sapiens
ctgtaaaagatcctatgcgaaagacactggctcttttttttaatcccccaaataaattttgcccccttttaggccatgttccattatctcttaaaattggaacctaattcgagaggaagtaagaagggtctgttctgtggctgagctaggtgaaccccggggtaggggaaagatgttaacacctttgacgtctttggagttgacatggaacagcaggtagttgttatgtagagctagttctcaaagctgccctgcctgttttaggaggcgttccacaaacagattgaggctcttttagaattgaatttactcttcagtattttctaatgttcagctttctaagaggcatatatttttcaaagaagtgaggatgcagtttctcacgttgcaacctattctgaagtggttt

SEQ ID NO: 1504 - DNA, 104 bp, Homo sapiens; identical to SEQ ID NO: 1377

SEQ ID NO: 1505 - DNA, 574 bp, Homo sapiens; identical to SEQ ID NO: 382
  misc_feature 342, 393, 410, 413, 463, 493, 495, 499, 523, 548: n = A,T,C or G

SEQ ID NO: 1506 - DNA, 542 bp, Homo sapiens
ccactcactctcggacgtagaccctggtgcacacaacgtcatccgccgtcatggtcaggatcagttccccatcgttggtcagttctctggtccacgaggtcttggggccctctcccttcaggagcttctgctcacagaccattttattctcactctcccatttcaccaggctcttacagggcctcccatccacagtctgctcctcaaactcctccccaaccttgaagttaatctctgtggtgcgcacggtggtggaggttttgatgtagaaagtgtctccctcctgtttgatctccactgctggcttggacgctgcagccacagcaatcttcctcagcatcacattcacccccagcactttgagcaattcctcgaagttttccgatcggatgattttccagttgccagagaagttgggcatggtggcggcgcgggaggcggtccccgtagactcctaggctggagcactggacactgtcttttagtcaaaagagacgtcgccgtcgccgggtcgtcaggttctggaaccaagacaagtccag

SEQ ID NO: 1507 - DNA, 386 bp, Homo sapiens; identical to SEQ ID NO: 1212

SEQ ID NO: 1508 - DNA, 286 bp, Homo sapiens
  misc_feature 261, 281: n = A,T,C or G
ttcaaagaatcacttttaggcttacaaaaataaatatttgtcaaaatgttcaataaatattacataaaactagcagcaaaaagtatctagaaatctgtcgtgtgcaaatagttttcttcccaactatcattcccatggtcccaaataaattttagaatctagtcccatccccttcctagacaagctgcgttcaacaatctccaagagacaaagtaagattggaagtttaaggacacgcacacaagacatatatataaaatnctctgaatgtgcaataaaangaagt

SEQ ID NO: 1509 - DNA, 526 bp, Homo sapiens
  misc_feature 227, 254, 258, 263, 266, 281, 284, 285, 289, 374, 389, 390,391, 414, 417, 419, 428, 447, 464, 472, 484, 485, 488, 490,492, 495, 500, 507, 510: n = A,T,C or G
ggggagatggggagaggaatgatctctgcccagccccttcctttccaaaccatgcaatggaagagcccagatgggtgaagattgattttgccttaactcaagagaattcctgttctccttgtgctatgatttggacacaagattctggatacctggaacttagctgtgtactcctgtaccctaaacagtggatttgagttccagcgtttattcttttttcctttttncagatcaccatctaagttacatctttngctnaggtncanccttctcaagatctnctnnttanccccccagcccctggtgctgtctgtggtcaggtgaccttactcaggagcagatatctccttggccgccatggagcctcatccatncacacgtgcctgtannnttccagagctcactgcccttctngangngccttcccncttggctttcaacgggttntgctcactctgttctgnccagggtntttaaaaaaaannccntnanaanccggncacccanaantttaaccccttttccc

SEQ ID NO: 1510 - DNA, 422 bp, Homo sapiens
  misc_feature 30, 173, 177, 178, 184, 185, 187, 189, 190, 191, 192, 194,195, 196, 199, 242, 243, 250, 263, 265, 273, 283, 287, 292,305, 313, 322, 323, 348, 354, 389, 417: n = A,T,C or G
aaaaaacatttcacaaataagatgtagctntccaaacaaatccattcgatgaccattatcacaactatattttattctaatttataaaacaaaaaatggttagacaagcacatgagatcaagagtcttcaacacagtggattccattttattaagaaaaaaaatagaaaacanggannccttanntngnnnnannnctncatagcatacgttatataaaattaaagttttgcttccaaaaanntgttccngtggggccggggngntgcccagngcttttgggnccancgccnaagacatgagaantttaaccntcgacttgnnatttttcataaaaactaaacatttncttatnggggtgggagtaaaaaatcttcctaggccattttnagtggcttaaaaaagggccccttttttncccct

SEQ ID NO: 1511 - DNA, 365 bp, Homo sapiens
  misc_feature 5, 11, 279, 299, 330, 334, 365: n = A,T,C or G
aaaanacaggnatctctgcagcaggccatgtgatgctccttaatggcctacataatccagccctcaagcacctccgtgatctctgtaaaactttcccttggtcactgtgcttcagtcacattaaccagcttgcatatttctcacattcaccaagcttgttcctgccttggggcctttgtacttaccatgttctgttctgagaatactctgcctcaagatatcctacaactatcttactgtattcagctttttttttttttttttttttttacgtcctgntgatgttaagtcctgttganagcaccaggtaaacactctgcaccccttctnttantagtaataggtttttcactccttggcctcan

SEQ ID NO: 1512 - DNA, 361 bp, Homo sapiens
ccatttgttggttcaattttgccatctgtgactggctcacattcttagacatgtcgccacctgaggggaaaaaaaaagattttgagtcagcgtaggaggtaatataatcagtataatcagggtataatagaaagtttgatgaactgagaaaatactaagaaaaaattacataatcctatcactctaacataattctttctatttctacatattcccttctaatctttttctcaattacatactattctttgaagaccatgtaaaattctatataaaaggacatataaaaggcttttttaaggctacgatttatgctaatactttatttatatctgtgaataagccactattagcaaaattg

SEQ ID NO: 1513 - DNA, 403 bp, Homo sapiens
aaaaaacatttcacaaataagatgtagctttccaaacaaatccattcgatgaccattatcacaactatattttattctaatttataaaacaaaaaatggttagacaagcacatgatatcaagagtcttcaacacagtggattccattttattaagaaaaaaaatagaaaacaagtagtccttaaattgtcttagctctccatagcatacgttatataaaattaaagttttgcttccaaaaatatgtttccatgtggtcgtggtgttgtccagtgctattagggccaaagcaccaaagacatgagaagtttaaccatcgacttgtcatttttcataaaaactaaacatttccttataggtctggagtaaaatcttctaggcattttagtgctaaaagtcacttt

SEQ ID NO: 1514 - DNA, 62 bp, Homo sapiens
ggcatggttgtggttaatctggtttatttttgttccacaagttaaataaatcataaaacttg

SEQ ID NO: 1515 - DNA, 265 bp, Homo sapiens
  misc_feature 34: n = A,T,C or G
tttaaataaaaattgtaaagcactccattcaatnaaagcacataagtccccctcaataattagtatgacaattcacgatacagctcttactctgggagagtttattttaccctttattccaaaaggcacaaagtcatctgaggcctcagatattaaccccactgcatgttaatgacacaccactgaggtgcagctcaatgtaattattaaagcttataacacacttccccaagaatttatagattctttctataaataataattt

SEQ ID NO: 1516 - DNA, 522 bp, Homo sapiens
  misc_feature 454, 482, 486, 505, 506: n = A,T,C or G
ccataaacacagaagatggttttggctttacattgacacatttctgtgtgtcaatgtagaagagaaaagaagtttaattataccttttaagcaggcaaaccattataataaactgctttagaaattactttaaaattatacacatttggaacaacagattttttaaaaaatgaagtttggtgttatgtcagcattttaactatttttgctatagcgaggcctcctcatatattatcataatttatcatagtttaaatagtgaatcatattctgatattctgattaataatcatattaattttgacaatgattttagtttttgaagttttagactgcaatacttaaaaaggccataatctactttaattaccttcatcctagattattaactataaataaaatgtttatatgatatttggattaggtacatggtacaatatctgtttttacctgnaagcatgaaaatgtcttaaaaggtaaantaanaacagccaaaaggtagtgnntttttaccctcgggcc

SEQ ID NO: 1517 - DNA, 248 bp, Homo sapiens
gttgtagcatgtgtcaattttcttcttttttaaggctgaataatatttcattggatgtctataccatgttttgtttatccatggtctgtcgatggacaccaatgttgcttccatcctttggctattgtgaataatgctcctgtgaacatgggtgtacaaatatctcttcaagaccctaaaggtggaactgctggacgatgtggtagcagagtagctattttaaccttttcattataaagaaacctttt

SEQ ID NO: 1518 - DNA, 322 bp, Homo sapiens
  misc_feature 27, 28, 186, 227: n = A,T,C or G
ttttatttttttaccaattccaatttnnaaatgtctcaatggtgctataataaataaacttcaacactctttatgataacaacactgtgttatattctttgaatcctagcccatctgcagagcaatgactgtgctcaccagtaaaagataacctttctttctgaaatagtcaaatacgaaattagnaaagccctccctattttaactacctcaactggtcagaaacncagattgtattctatgagtcccagaagatgaaaaaaattttatacgttgataaaacttataaatttcattgattaatctcctggaagattggttt

SEQ ID NO: 1519 - DNA, 339 bp, Homo sapiens
ctgatctctacacgccaccacctgtttcatgtgcatgggaagagtaaaaaatgaacccggataaaataaaacaaaagcaaacaaaatgctaaatcattggttattatccacatcaaataagtctggttctgtggaatatctaaaagtcacagttttatgcctttaactactatacataagggatgactttttaacctccagggcttatacaacaaaacacacctcagaagcttatataacaatatactactttttccattttatcaacaattcagcctgccttaagctacaaagtaaaataattagacaactgtgatatcaaaacaaagattatgtaag

SEQ ID NO: 1520 - DNA, 189 bp, Homo sapiens
ctgcaggcagtggggacttggggactagaacaggcagggaggtggagagctattctggtgggatgtcctaggggctgatgaaagtgagccttgacagcagctttgttctaaaggagcttaaagagaaagcagtggccgggcgcagtggctcaagcctgtaatcccagcaccttgggaggccgaggcggg

SEQ ID NO: 1521 - DNA, 445 bp, Homo sapiens
  misc_feature 406, 422: n = A,T,C or G
gttggactgcaaattgagtttctttctctttaggcctttcacaactaggactgagaatgtatgcaaaagttctgtgacagtacagaaggaaaacaactttttatgtatagcttctaaaagggaaaaaaaaaaaaaaagagaaaccctttgacttccacgtgcccatctcaagacattccactcacagatttgaggttctggattccaggtctggagttttccaatgttaatgtaaacagaactggcacacacacattaagatgaatgtaattattattcctcttgctggtcactaccgtcgctttctatttctctttctttgtgtgaatttatttaaaagaaaaaaaaactttttgtaacgactatttgcagtttaaaaatcaataaaccccgttttttcaagaancgaaaaaaaaaaaaangaaaaaaaaaaaaaagcttgtac

SEQ ID NO: 1522 - DNA, 349 bp, Homo sapiens
  misc_feature 5, 6: n = A,T,C or G
cattnngatgacagcctacccagatgtggccccgaggaaggatcaatagataaattatccaccagtgtatccagctcaagtaccttcaactgagttaaattcatattagtgtgtttttccaaaacatgaatttcatgagccaatatgtcagcaacatagatatacttatcatcaggtgaaatattgatcccatttcctgaatcaaatccttctgctaccactttaacttcatttggactgtagtaaacaacatttgcccagtgtaagttcaagtatgtttctaaatactttaagaaaggatcagagaagtagtggtcatttgtggcatagaaatgtgccggtccaacag

SEQ ID NO: 1523 - DNA, 157 bp, Homo sapiens
tatgcagattatttgcccaaagttgtcctcttcttcagattcagcatttgttctttgtcagtctcattttcatcttcttccatggttccacagaagctttgtttcttgggcaagcagaaaaattaaattgtacctattttgtatatgtgagatgttt

SEQ ID NO: 1524 - DNA, 451 bp, Homo sapiens
aaaatctctggcttcaaagtttcttggggaaaggtcggtttacctcacattttttgtttccattagtaatattctaggtacctcacaaaatgtattatggtgccatggctgttagtttttagcgagtgctgtaggattaattcgaaaataggcagaattccattcctcccaaggtggcaaaaattagctatactgatgtaattgtcatttacctgggtatgaattccctgacacacattcatgtcaacatatgtagcaaattttgtgaaaacataacaatttgaagcttctgtaattttgagcactgctctaacaacaagcataatataaaattagttagattttgcaagtctacaaatgagctcttgcaacagaactcacagcctttttacttttttcccctaactttagcaatgtagtatcttgagccattaatttttgggtttttttt

SEQ ID NO: 1525 - DNA, 229 bp, Homo sapiens
tatagcctgcgcgctccaggactgcctacccagcactaccccaaacccccagttccaaacccgagacttcaggcccgcccccttacgcgttgtctcattccaccaaattcagaatatttacacaatgccttcatgattttatttttctggaaattgaagtgtcaattgggttctcaatatttcatgactccaaggatgcattaaatatttatttgtggtaagagaagat

SEQ ID NO: 1526 - DNA, 571 bp, Homo sapiens
  misc_feature 548: n = A,T,C or G
ctgacatccggcctgcttcttctcacatgacaaaaactagcccccacctcaatcatataccaaatctctccctcactaaacgtaagccttctcctcactctctcaatcttatccatcatagcaggcagttgaggtggattaaaccaaacccagctacgcaaaatcttagcatactcctcaattacccacataggatgaataatagcagttctaccgtacaaccctaacataaccattcttaatttaactatttatattatcctaactactaccgcattcctactactcaacttaaactccagcaccacgaccctactactatctcgcacctgaaacaaactaacatgactaacacccttaattccatccaccctcctctccctaggaggcctgcccccgctaaccggctttttgcccaaatgggccattatcggaagaattcacaaaaaacaatagcctcatcatccccaccatcatagccaccatcaccctccttaacctctacttctacctacgcctaatctactccacctcaaatacacttactnccccataatctaacaacgtaaaa

SEQ ID NO: 1527 - DNA, 171 bp, Homo sapiens
  misc_feature 54, 63, 152: n = A,T,C or G
gtgtgagcaaccagtgtagtgactctttggttcattattcgtgttgtttttatncttagtcantgtgtgacccaacagtggcaggggttacaaccccctctcctttcttttttgtatttatctatttgtaggattgtcagatcaagtacaanatgcccacttaagtttgaa

SEQ ID NO: 1528 - DNA, 571 bp, Homo sapiens
  misc_feature 545: n = A,T,C or G
aaataacatcaactcacaaatgacttttagaagccaaataaacatttctattttagagaatagtatgtaatacataacttaaaagcatatagaacacatattcctacattcttaaaaataagagattgtgattccacagagaatttttcaaatatctaaagtatgtcctgttaaaccaacaatttgcttccaaacaggagtctcttttgagaagctaaatattaattttcaaacaactatttctccatttgttaactggaatcattcatattaaaacaaaggtctttatgtcaatgtatgttaatatggctgaaggctccagccctgagttatttttttacttccttaaattcataattacaacatatatcaatttgaggtatcatgacaaaaacagaaacaaaagacacaatggtagatgagaatctatctccctgtggaagaggcaaaattagtgtggacctcatttttctgacctataaaactaggaagtataatcacattacttgcgacaattttttcttctaaaatgcctgaatttgaanggagactctgccttctccctgcccgg

SEQ ID NO: 1529 - DNA, 621 bp, Homo sapiens
ctgacttcttttcaagttcccacattaggacattgatcagatgtgaatttttaattacaatcggcacttcttcaaacatgtactcaaaggtgatatttgcttttttcaatgcttcaggggaaaaatccttttctttacaaacttccatcagtttaggagtcagtctgtatgcctttagtgagagagatccttgggcagtttttatgggatcataaatgagaacgacagattcttcaatggcatgctggtaactaaactgagagtccaggagtgcccgggtaacgaatgagccatagtatgtggactgataccagcccacgtgaagatgatcaatgtttacatggcgaaggctccgcatcatttccatctgatattggacttcatcaaagtcagcatcatcctctgtgtgttgagggaaaggaaagcagttggtaatttcaagccgatcttctacaaccagacccaaaagcactccttgaacaacttcagttccttgtccttcttcttgataatgtttgattatctttaataccacaaggccatctatctgcacttgcttcacggctgaatctcccgagccgcctttgcctttgcctttccctgctgcgccggcggtggagc

SEQ ID NO: 1530 - DNA, 325 bp, Homo sapiens
  misc_feature 28, 290, 323: n = A,T,C or G
aaaaactgattacagcaaatgaaacacngttgtctaagtgatatagtatacaaaaataacatcttgatttctgtgaaaatgcatttctctgcaattcctgaatagctccaaattatgctaactctgagcattgatgtttactctgggttttagatttaggtctttgaaaataatgtgttctaaacctttgccatcaccatctatgtgtccaacatcaacactgtgatgaagttgttcctgtttaggcttttattccgatttctctcgaacagccattaacatgcatgttnatctttttgtttactcccactcaactgtatgtnct

SEQ ID NO: 1531 - DNA, 669 bp, Homo sapiens
  misc_feature 593, 610, 620, 655: n = A,T,C or G
aaaccaatcttccaggagattaatcaatgaaatttataagttttatcaacgtataaaatttttttcatcttctgggactcatagaatacaatctgtgtttctgaccagttgaggtagttaaaatagggagggcttttctaatttcgtatttgactatttcagaaagaaaggttatcttttactggtgagcacagtcattgctctgcagatgggctaggattcaaagaatataacacagtgttgttatcataaagagtgttgaagtttatttattatagcaccattgagacattttgaaattggaattggtaaaaaaataaaacaaaaagcatttgaattgtatttggtggaacagcaaaaaaaagagaagtatcatttttctttgtcaaattatactgtttccaaacattttggaaataaataactggaattttgtcggtcacttgcactggttgacaagattagaacaagaggaacacatatggagttaaattttttttgttgggatttcagatagagtttggtttataaaaagcaaacagggccaacgtccacaccaaattcttgatcaggacccccaatgtcataggggngcaatatctaccaatanggtagtctcncagcccttgccgtgttcgatattccaaagactggntttgctccattccc

SEQ ID NO: 1532 - DNA, 199 bp, Homo sapiens
ggtacaacctgcaaattacttgcagttctgagtttcagataaaacattataaaacattaaattcaatacatactgctcctttgaaatttgggtaaaaaattgtacaaccgtatatatagtcatttttgtattttttctatgttgtgaaaaccaaaattgtaattttataagtctttgattcactaaaattatataattt

SEQ ID NO: 1533 - DNA, 301 bp, Homo sapiens
  misc_feature 53, 56, 69, 98, 101, 122, 131, 146, 162, 177, 194, 211, 301: n = A,T,C or G
ttttttttttttttttttccttggaccataaatttttattggcaggtcagganaanagccgggggtaanagtcccttccttcccatccctctacccanaanacaccctccaaaggacagcanaagccccanagcctgctgcctcanaggaccttggaggcanacaaattgttgtagngatcttcctgtccctcnagcaggctgcggtaggnggcaatctcctgctccagccgcgacttgatgtccatgagccgctggtactcctgattctgccgctcactatcagctcgcacatcgcccan

SEQ ID NO: 1534 - DNA, 450 bp, Homo sapiens
  misc_feature 435: n = A,T,C or G
ccaccacatctttattgcatactcaggtgaataacttattatacaatgaacactcctccattaggagaccatgcccacttacagaatgcagccgtaaatgcggtaaatctatttacagaggttggggtgcaagatgagagaagtatcagccccaggaatttgaagtgagaatgatctacaaattctcctgacaaggagcaaccgggcttgtgctagtgaggtctgaaagaattcctggcagagcgtagggggagattagatctcggaattgacagcaagtttggggacagtgcaagaagagaggggtgacctgtgaattggtgctggggagctgctgaggcccaatgtgaggcagcactagagagatgagtaaatttagggtgatctttagcctctcctacccaggcaagaagggttggggagcgggggtgccancaagttggcttccag

SEQ ID NO: 1535 - DNA, 451 bp, Homo sapiens
aaaaaaaaaatcaaaggcaatcattctaaatgtactatgatagcatgttaaagatgcaagtatgctatagaaccaaagtaatatgaacagcactactcattacctaggagaaaggtgactggttttcacacaaagctaagcctgtaacagtcatcctaatcacaatggcttataaaagcatcaggtttccagtagagaaactattctaggaaagtcagtaaatctcttgaaagtttcacatctgtaaaaccaggataaggctacaactattttgaaatctgaacaaggtatcagatgaaagagtaagattcccagccataatgtaagatagaaaggtcctcatgcagcatatgctcgctggctccgggaaggcttcacgtgcataatacagaagttgccaaagaaggaaactggagacgttcagctacatttccatggtgccgtgaatttt

SEQ ID NO: 1536 - DNA, 365 bp, Homo sapiens
ccacagctaacatcattgcagcacctttactccttcggctttttgccagcaccaacattggcctttgcagtccccctgactttcttcattctgttcttgcgttcctttcgttgctttcctgaggtctttttcttctcatacaggccatgtcttgcaagtctatgtttgggttcatttttctttgcataatccagggaatcataaatcatgccaaagccagttgtcttgccaccaccaaaatgagttctgaatccaaatacgaagatgacatccggtgtggtcttgtacattttggctagtttttcccgaatttctgtcttaggcactgtcgccttcccggggtgaaggacatcaatgaccatttg

SEQ ID NO: 1537 - DNA, 263 bp, Homo sapiens
ctgttgcacacttggactgtcaccttctccaggctggcagttgatatcttattttttttccaactcatttttattaaaaaaataaaaaaatgctccaactatcagctttacaaaatctctaagggaaacacaagagcaaggtgctgaggtaaaaacacctgaggtagcttcttctgtgtgtttttctcgttaaaaaaatctgtgaatttaacgccctgggccaacaaccttggtaaatttctactttcctccacatttttttt

SEQ ID NO: 1538 - DNA, 181 bp, Homo sapiens
  misc_feature 28, 39, 45: n = A,T,C or G
ccagagtgaccaggctgaccagcaccanccctgatccanatgcanaggccaggatgtgggcccagccctgtgccaggaggctggctggaataaaggtacagatagaggcctcaccccctctgggaccactggcactcagggtgtttgcagcctcagagcccacctgcccccagggccacag

SEQ ID NO: 1539 - DNA, 341 bp, Homo sapiens
catcatcgatgtggcccccttggacgttggtgccccagaccaggaattcggcttcgacgttggccctgtctgcttcctgtaaactccctccatcccaacctggctccctcccacccaaccaactttccccccaacccggaaacagacaagcaacccaaactgaaccccctcaaaagccaaaaaatgggagacaatttcacatggactttggaaaatattttttcctttgcattcatctctcaaacttagtttttatctttgaccaaccgaacatgaccaaaaaccaaaagtgcattcaaccttaccaaaaaaaaaaaaaaaagaataaataaataactttt

SEQ ID NO: 1540 - DNA, 230 bp, Homo sapiens
  misc_feature 26: n = A,T,C or G
ctgccgacggagagtctcattttggnaagtatccgagcaaaaccaaaacaaaacaaaaaccaaataaaatggtggtttagcagagacgcgcacattcacattgcacaaggcactgctggggcacagaggccagatacaagtgttgatatcggctggtaaagcaaaatatttggaaagcttgtcataactccggtccctctgggatggactgatcgtgcttcgtgttccta

SEQ ID NO: 1541 - DNA, 507 bp, Homo sapiens
  misc_feature 449, 457, 464, 467, 468, 472, 476, 482, 484, 488, 489, 490,491, 495, 496, 497, 498, 499, 501, 502, 504: n = A,T,C or G
tgttattgctgttattgtggttgtggtgatagcagttgttgctggaattgttgtgctggttatttccagaaagaagagaatggcaaagtatgagaaggctgagataaaggagatgggtgagatgcatagggaactcaatgcataactatataatttgaagattatagaagaagggaaatagcaaatggacacaaattacaaatgtgtgtgcgtgggacgaagacatctttgaaggtcatgagtttgttagtttaacatcatatatttgtaatagtgaaacctgtactcaaaatataagcagcttgaaactggctttaccaatcttgaaatttgaccacaagtgtcttatatatgcagatctaatgtaaaatccagaacttggactccatccgttaaaattatttatgtgtaacattcaaatgtgtgcattaaatatgcttccacagtcnaaaacagnaccaaanaanncacngaanaaaaancntacnnnnaaannnnnanngnttg

SEQ ID NO: 1542 - DNA, 371 bp, Homo sapiens
gagaaactgtgtgtgaggggaagaggcctgtttcgctgtcgggtctctagttcttgcacgctctttaagagtctgcactggaggaactcctgccattaccagctcccttcttgcagaagggagggggaaacatacatttattcatgccagtctgttgcatgcaggctttttggcttcctaccttgcaacaaaataattgcaccaactccttagtgccgattccgcccacagagagtcctggagccacagtcttttttgctttgcattgtaggagagggactaagtgctagagactatgtcgctttcctgagctaccgagagcgctcgtgaactggaatcaactgcttcagggaaaaaaaaaaaaaaaaaaa

SEQ ID NO: 1543 - DNA, 245 bp, Homo sapiens
  misc_feature 38, 45, 88, 101, 146, 216, 229, 245: n = A,T,C or G
tcttttctgaaaaaaaaaaaaaaagggaaaaaaaaaangcttgtncaaaaaaacttttttttgccatccatcctgtgcaatatgccgngtaaaatatttgncttaaaattcaaggccacaaaaacaatgtttgggggaaaaaaaanaaaaaatcatgccagctaatcatgtcaagttcactgcctgtcaaattgttgatatataccttctgtaaanaactttttttganaaggaaataaaatcan

SEQ ID NO: 1544 - DNA, 98 bp, Homo sapiens
  misc_feature 25: n = A,T,C or G
ctgactaaactttttttctgtaccngttaatttttccaactactaatagaataaaggcagttttctaaacttccaaaaaaaaaaaaaaaaaaaaaaag

SEQ ID NO: 1545 - DNA, 446 bp, Homo sapiens
aaaaaatacaccacacgatacaactcaatacaggagtatttcttctcaaattcttctagcaccatcaacattcttcaagtatctgaaatactattaattagcacctttgtattatgaacaaaacaaaacaaggacctcagttcatctctgtctaggtcagcacctaacaatgtggatcacactcatgggaaagtgttttgaggtagtttaaacctttggaagtttgggttttaaacttccctctgtggaagatattcaaaagccacaagtggtgcaaatgtttatggtttttatttttcaatttttattttggttttcttacaaaggttgacattttccataacaggtgtaagagtgttgaaaaaaaaattcaaatttttgggggagcgggggaaggagttaatgaaactgtattacacaatgctctgatcaatccttctttttct

SEQ ID NO: 1546 - DNA, 277 bp, Homo sapiens
  misc_feature 11, 27, 88, 170: n = A,T,C or G
cctgagggganaccaccttctgatganaaccaacccctagctaccactctgtattcatcaggggaggggtataaaccccacatgcaanaagaacccttgcccccagtgtcaaatgggatggggatgctagagttatagtaaaggggaaaccctatgtaagctgttaacanagttcacaggggtagggataacccctgttctccagctcccaaatgtgctcactttcccagcttcttcatccgttcatcaatgctggcaaagttcccctcaactgtgg

SEQ ID NO: 1547 - DNA, 365 bp, Homo sapiens
  misc_feature 28, 48, 49, 51, 58, 73, 82, 83, 84, 89, 90, 104: n = A,T,C or G
caacagtcgctccctggacctggacggnatcatcgctgaggtcaaggnncngtatgangagatggccaaatgncacccggcnnnaggtnnaaccctggtaccanaccaagtttgaggccctccaggcccaggctgggaagcatggggacgacctccggaatacccggaatgagatttcagagatgaaccgggccatccagaggctgcaggctgagatcgaaaacatcaagaaccagcgtgccaagttggaggccgccattgccgaggctgaggagcgtggggagctggcgctcaaggatgctcgtgccaagcaggaggagctggaagccgccctgcagcgggccaagcaggatatggcacggcag

SEQ ID NO: 1548 - DNA, 423 bp, Homo sapiens
aaaaaaaactgatattaaatgtgacacttcagagctactactggaaggagtaattcgtaacttccctaccctccttccatccctgctgattcaggagaagggggaaaaaacaaagaaaacaaaacgaaaaaccaaccagggtctcttgtagatttgctgctattccacaaaatgttggcatttgctgccatgccacaatgttggtccactgaaataggatttctgcggaaactgtcaacagtagtaattcaccatatgcaagtaccatccttatcatgcgagaataatcacaggttctgtagaaatgtacaatgtgcttaagataatgaaaattgtagcgctgcatctgagatttatttctctacttagctagtaaaacttgtcatttttgctcacttaagtatgatcatttgtgattccttt

SEQ ID NO: 1549 - DNA, 374 bp, Homo sapiens
  misc_feature 113, 170, 199, 201, 216, 226, 231, 234, 236, 246, 252, 253,257, 259, 263, 274, 276, 280, 287, 293, 310, 340, 360, 362,368: n = A,T,C or G
aaatagcatttatctcagttggctctatgccagttggtcttggtattggggtaagggggtattgcaggtaaaaagaggtgaagcagattctggctttcagtttcttagctcanaaattccagcaatccctgtagttctttgcatcccctcaccacctctggaatagaaancagggtcttataaatatgctgaaccatgncntctaatttttctaanctctttgcanaaccnccnanggttttcctntagganntttntntggntctggacctgnancatnagttttnccttcncatttttcatctccagnaacatcctctcagtttgcccacctcctganagagccacactttctcctgnanccaatngggggg

SEQ ID NO: 1550 - DNA, 341 bp, Homo sapiens
agaggattgagtaagtagttggatggctttcataaaaacaagaattcaagaagaggattcatgctttaagaaacatttgctatacattcctcacaaattatacctgggataaaaactatgtagcaggcagtgtgttttccttccatgtctctctgcactacctgcagtgtgtcctctgaggctgcaagtctgtcctatctgaattcccagcagaagcactaagaagctccaccctatcacctagcagataaaactatggggaaaacttaaatctgtgcatacatttctggatgcatttacttatctttaaaaaaaaaaaggaatcctatgacctgatttgg

SEQ ID NO: 1551 - DNA, 311 bp, Homo sapiens
aaatccttgaggggtacagcatcactcggattctgtgtccaatggccttagcaggaagattgcttcggaatttggcacgaaccatgccactgtttccatgggcccgagttacttttccccagatgactctggttttgtttggtttgccgccaggagtgactgtgttgttctttgctttatatacataagcgcatctcttgcccaaatagaattctgtttcatctcgggcgtaaacaccttcaattttaagaagagctgtgtgctccctttggttccggagaccccgcttatagccagcaaaaatggccttg

SEQ ID NO: 1552 - DNA, 345 bp, Homo sapiens
ctgctgccttcatattgaaggtttttgagttttgtttttggtcttaatttttctccccgttccctttttgtttcttcgttttgtttttctaccgtccttgtcataactttgtgttggagggaacctgtttcactatggcctcctttgcccaagttgaaacaggggcccatcatcatgtctgtttccagaacagtgccttggtcatcccacatccccggaccccgcctgggacccccaagctgtgtcctatgaaggggtgtggggtgaggtagtgaaaagggcggtagttggtggtggaacccagaaacggacgccggtgcttggaggggttcttaaattatattt

SEQ ID NO: 1553 - DNA, 386 bp, Homo sapiens
cactctcctgttgactatttccagagctctaggtgtttaggcagcgtgtggtgtctgagaggccatagcgccatcatgggctgatttttattaccaggtcccccagaagcaggtgggaggctctgcttcctgctgccgctctgcagcctggacctgtggaccctggttgtaaagagtaaattgtatcttaggaaaccagtgtcacctttttttcaccttttaattttatattatttgcgtcatacatttcctgtaacggaagtgttaattttactgtactttttggtaccttttgggaatctaatgtattgtaaggtattttacacgtgtcctgattttgccacaacctggatattgaagctatccaagcttttgaaataaaattt

SEQ ID NO: 1554 - DNA, 239 bp, Homo sapiens
  misc_feature 40, 86, 140, 184, 223, 239: n = A,T,C or G
cttttctgaaaaaaaaaaaaaaaaaaaaaaaaagcttgtncaaaaaaactttttttgccatccatcctgtgcaatatgccgtgtanaatatttgtcttaaaattcaaggccacaaaaacaatgtttgggggaaaaaaaanaaaaaatcatgccagctaatcatgtcaagttcactgcctgtcanattgttgatatataccttctgtaaataactttttttganaaggaaataaaatcan

SEQ ID NO: 1555 - DNA, 358 bp, Homo sapiens
ctgggtcacatccatccctccattcatccttccatccatctttccatccattacctccatccatccttccaacatatatttattgagtacctactgtgtgccaggggctggtgggacagtggtgacatagtctctgccctcatagagttgattgtctagtgaggaagacaagcatttttaaaaaataaatttaaacttacaaactttgtttgtcacaagtggtgtttattgcaataaccgcttggtttgcaacctctttgctcaacagaacatatgttgcaagaccctcccatgggggcacttgagttttggcaaggctgacagagctctgggttgtgcacatttctttgcattccag

SEQ ID NO: 1556 - DNA, 309 bp, Homo sapiens
cctataattcctaccttgactgtgtgcatcatttgtaagctagcagatctatgtggtgaaaatgcacaggagcttggtagactgcgggggaaagagagagctcctttcgccatgttttaccagtctgctgttataacctcttaggttgtatcctttaatttccagccttttaggttagtttctgtaacagaacaagtgagtctgggatgaagtcctcaaagtacttcaaatggtaattgttttgtttttgtaatagcttaacaaataaacctaggttttccaaaaaaaaaaaaaaaaaaaaaaaaaaaa

SEQ ID NO: 1557 - DNA, 152 bp, Homo sapiens
tttaaaaattgaaaaaagtggaaaacatctttgtacatttaagtctgtattataataagcaaaaagattgtgtgtatgtatgtttaatataacatgacaggcactaggacgtctgcctttttaaggcagttccgttaagggtttttgttttt

SEQ ID NO: 1558 - DNA, 371 bp, Homo sapiens
ccatagctgtaataacaatgacaacagtaggtaacggtagtcataccaacagtagggcagtgcattttatattacaactggtttcttgctctagtaggcttggggatgggtgaagacggacagggctggcgcagaccctttccttctcctctccagcccacagtgatctgggcttttacaagacagcctgcttccattcagtagtgtgggaaagttccttcttggcttagcaatacccctgagaccttgttcagtgggctgtgtctctccctgggatgctgggagcaccaagtgtggccgagctagggctgctgacttcctctgggcgcctctgggctgcgagggtctcttacaggaattgaggccctttg

SEQ ID NO: 1559 - DNA, 418 bp, Homo sapiens
  misc_feature 24, 25, 104, 349, 350, 396, 399: n = A,T,C or G
aaaaaatttaactccatatgtgtnnctcttgttctaatcttgtcaaccagtgcaagtgaccgacaaaattccagttatttatttccaaaatgtttggaaacagnataatttgacaaagaaaaatgatacttctctttttttgctgttccaccaaatacaattcaaatgctttttgttttatttttttaccaattccaatttcaaaatgtctcaatggtgctataataaataaacttcaacactctttatgataacaacactgtgttatattctttgaatcctagcccatctgcagagcaatgactgtgctcaccaggtaaaagataacctttctttctgaaatagtcannatacgaaattagaaaagccctccctattttaactacctcaactggncangaaacacagattgggttct

SEQ ID NO: 1560 - DNA, 548 bp, Homo sapiens
  misc_feature 420: n = A,T,C or G
cttagagtcttttgtgccataatgcagcagtatggagggaggattttatggagaaatggggatagtcttcatgaccacaaataaataaaggaaaactaagctgcattgtgggttttgaaaaggttattatacttcttaacaattctttttttcagggacttttctagctgtatgactgttacttgaccttctttgaaaagcattcccaaaatgctctattttagatagattaacattaaccaacataattttttttagatcgagtcagcataaatttctaagtcagcctctagtcgtggttcatctctttcacctgcattttatttggtgtttgtctgaagaaaggaaagaggaaagcaaataccgaattgtactatttgtaccaaatctttgggattcattggcaaataatttcagtgnggtgtgttattaaataagaaaaaaaaaaattttgtttcctaggttgaaggtctaattgatacgtttgacttatgatgaccatttatgcactttcaaatgaatttgctttcaaaataaatgaagagcag

SEQ ID NO: 1561 - DNA, 311 bp, Homo sapiens
aaatgtcattggaaaagttttattgaaaaaaaatgtacaaataagttcttggattgatagcaacaaaggctcatgttcccccttccctccctatctttgaagaactaaaaaaggaagaaacaaaacaaaaagctcatccccacaacgccagacacgatgcttcttgaccagagtcttcccagaagcccctcctgggagctccttctcaatccgcctcactgcggccaggtcattctgggggtgcctggtcccaggggctgcagcgcctagttttatagttgggagaggttgggatagagctggggaggcag

SEQ ID NO: 1562 - DNA, 266 bp, Homo sapiens
  misc_feature 40, 92, 95, 143, 152, 236: n = A,T,C or G
ataatggacttttctgtaagaatgtaaaactcaaaaattngccaagtatgtatctgatccacacaaatccttagaaaggttttctgtgtagnctncattaacgcaaatctttgggaatgtttcactcttactgtagagatctngaatatgcntcacaataatgaagctacaaagtttttatgcagtgcattcattgtaaactataaataacatttgtattaaaaggaaagctgggnaatacaaaaataggagagactctgaggagc

SEQ ID NO: 1563 - DNA, 78 bp, Homo sapiens
  misc_feature 60, 67, 74: n = A,T,C or G
caaataataaattagttaaatcagtttctgagttatgccactggctgatgaaaagttganaggtctntttgcanaatg

SEQ ID NO: 1564 - DNA, 261 bp, Homo sapiens
ctggtaaaggtgactgtacagatgtgcattttccttttggtataaatggtccacagcactaactggtaaggcttattgtacagtatattgtcagtattcttctggttcagcataccttatagttcatatataacctgtattaattgtatagattgtgcattaaaagctgttaccaagttgtcagaacataagagcgaaaacaaggtcatatgtaatattttgtttgtaagtatcctttgtatcatagcaaaggaaatgttt

SEQ ID NO: 1565 - DNA, 322 bp, Homo sapiens
ctgactccttgaatatccagtgtgacccataaaatagtctgttaataccggatcttaatttttatgttattcattaagattttaactatattcagtacgtaatttggagacaaactagcatcatcaaaactgcctgtaaatagggtgtttagtctttctataaaaacagaatagggcagttacctaccagttaaaatatcttatatgaagaaaatagaataaagatccagtcatatatgtaaataagatgtactgattgtacgtaaatgaaaaatggaccctttaaaaattatttttacctgaagcttgtcataattttttt

SEQ ID NO: 1566 - DNA, 370 bp, Homo sapiens
  misc_feature 296, 299, 331: n = A,T,C or G
aaagtttgctaaatcttagcacaaatgcagattcccagagctcttctgattttgaagttccctcaactccagaagctgagttacctaaacgagagcatttacaatatttatatgagaagctggcaactggtgagagtatagcagtcaaaaaaagaaaatgctcactcttagatacctaagaattcaaagcgtttcaacctagagcaaccactaaaaaacctgcacagagatggcagtcaatattacaatagagaaaatacagtacttaaaaatgttcaaataacctggttgggtgnggnggctcacacttgtaatcccagcactttgaggngggcaatggcttgagcccaggagttcgacaccagcctgg

SEQ ID NO: 1567 - DNA, 115 bp, Homo sapiens
ccaccactcacgtcccaggtgacgtttatgacatgcccgcctgtcctgttacccccttgctcagaaaccttcaggagttagccaccgcccataggacaaggttccaaggggcttt

SEQ ID NO: 1568 - DNA, 181 bp, Homo sapiens
gctgccccagggcctgggaaggaggccgctatgcagggtagcactgggaacaggagacccacctgaggctcagccctagccctcagcccacctggggagtttactacctggggaccccccttgcccatgcctccagctacaaaacaattcaattgcttttttttttggtccaaaataaaac

SEQ ID NO: 1569 - DNA, 497 bp, Homo sapiens
ctgagaaatctaggtggattcatattcgtaatcattgattaacatgcacatttgggtttgcacatttttgtttatcatacatttttctccgttttctattaaagaacatgctctaggggaactattaatagcccaccagtcgggtaggcagcattcaatccttctatgccttctttcgccacctgttgaggtctttcttctgaaacaaagaagaaatagacaaatcagacttgccctcttggaaatgtggtccagatttctctactcccaagctccaaaaaaggcatacattggatgggctagatcaactcctcctgagagccataaatccgccaagagttgttttccatgtaagggtgtggtacaatggggaacgcctgatgttggaggaaagcaggaggactttagagtggagttgcattctaatctctctgccgcttcaactatgtgacctggggcaaatgatataaactctatgagcctctttccttatcttt

SEQ ID NO: 1570 - DNA, 413 bp, Homo sapiens
ccacaccagggaccctgccagaggccgcagactggcagcagcagcctccccacacagtgggggaagagccactccatccccaaattcaagattagaaagatccctgactgcttctcaagatccagaacattccttgacagagtatattcaccatttagaagtgatccagcaaagattgggaggggtactaccagattctacttcaaagaaatcctgccacccgatgattaaacagtgaatgaaatgtcatggctctttcctgcgacaattctatttgaggaaaagatttgtttttcccttttcccaaggaagctcgtgggacagcatgggcactactcttcatgtgcggtgacaccagcccccagatgccttgaattaagtgtcctcacctttatgcatgactgcaaagccag

SEQ ID NO: 1571 - DNA, 385 bp, Homo sapiens
aaaacattgtcaggtgaggcaaatgcacaagtaatagaaagcaaagggcaaggttcactgaatcacagcagtcagaagaaagtgctttagggaaccaagagattgtttccagcctgaagaggcatgggtggcaaatcagaaaaggggattgagattaaaatagaagacttcagtctggattgttgatgacactcagtatggactatatttgtctctccttttcctttctccccatctttgggcttaatttacatgtagtgcccaggactgttcaatgcgctttttctatacttgcttgcatttttgctttaatgtcttctacagaactaggtccttttggtgttttaggagttttttcctgtttcttgaaggattcttgtccttt

SEQ ID NO: 1572 - DNA, 155 bp, Homo sapiens
atcaaagcagtggacaagaaggctgctggagctggcaaggtcaccaagtctgcccagaaagctcagaaggctaaatgaatattatccctaatacctgccaccccactcttaatcagtggtggaagaacggtctcagaactgtttgtttcaattgg

SEQ ID NO: 1573 - DNA, 527 bp, Homo sapiens; identical to SEQ ID NO: 1336

SEQ ID NO: 1574 - DNA, 427 bp, Homo sapiens
ccattttctccctgacggtcccacttctctccaatcttgtagttcacaccattgtcatggcaccatctagatgaatcacatctgaaatgaccacttccaaagcctaagcactggcacaacagtttaaagcctgattcagacattcgttcccactcatctccaacggcataatgggaaactgtgtaggggtcaaagcacgagtcatccgtaggttggttcaagccttcgttgacagagttgcccacggtaacaacctcttcccgaaccttatgcctctgctggtctttcagtgcctccactatgatgttgtaggtggcacctctggtgaggcctgtcagagtggcactggtagaagttccaggaaccctgaactgtaagggttcttcatcagtgccaacaggatgacatgaaatgatgtactcagaag

SEQ ID NO: 1575 - DNA, 520 bp, Homo sapiens
ctgtagcacaaacagatttgaaggagccgctgaaagttcttggcattactgacatgtttgattcatcaaaggcaaattttgcaaaaataacaaggtcagaaaacctccatgtttctcatatcttgcaaaaagcaaaaattgaagtcagtgaagatggaaccaaagcttcagcagcaacaactgcaattctcattgcaagatcatcgcctccctggtttatagtagacagaccttttctgtttttcatccgacataatcctacaggtgctgtgttattcatggggcagataaacaaaccctgaagagtatacaaaagaaaccatgcaaagcaacgactactttgctacgaagaaagactcctttcctgcatctttcatagttctgttaaatatttttgtacatcgcttctttttcaaaactagttcttaggaacagactcgatgcaagtgtttctgttctgggaggtattggagggaaaaaacaagcaggatggctggaacactgtctgaggaatgaatag

SEQ ID NO: 1576 - DNA, 201 bp, Homo sapiens
ttcgtgggcaaacgcagaggcgggaacaaactagccctcaagacgggaatagtagccaagaagcagaagacggaggatgaggtattaacaagtaaaggtgacgcgtgggccaagtacatggcagaagtgaaaaagtacaaagctcaccagtgcggtgacgatgataaaactcggcccctagtgaaatgacgcccctccccc

SEQ ID NO: 1577 - DNA, 313 bp, Homo sapiens
aaaatctcttcttcctcaggagtcagcttggctcccttcttgcggcccaggggcagcgcataatgggactcgtaccactgtcggtacggtgtgctgtcgatgagcacgatgcaattcttcaccagggtcttggtacgaaccagctcgttattagatgcattgtagacaacatcgatgatccttgttttacgagtacaacactctgagccccaggagaaattccccacgtccaacctcagggcacggtatttcttgttacctccccgcacacggactgtgtggatgcggcgggggccaatcttggtgttggcag

SEQ ID NO: 1578 - DNA, 151 bp, Homo sapiens; identical to SEQ ID NO: 991

SEQ ID NO: 1579 - DNA, 419 bp, Homo sapiens
aaaccaaagtttagaaagaggtttttgaaatgcctatggtttctttgaatggtaaacttgagcatcttttcactttccagtagtcagcaaagagcagtttgaattttcttgtcgcttcctatcaaaatattcagagactcgagcacagcacccagacctcatgcgcccgcggaatgctcaccacatgttggtcgaagcggccgaccactgactttgtgacttaggcggctgtgttgcctatgtagagaacacgcttcacccccactccccgtacagtgcgcacaggctttatcgagaataggaaaacctttaaaccccggtcatccggacatcccaacgcatgctcctggagctcacagccttctgtggtgtcatttctgaaacaagggcgtggatccctcaaccaagaagaatgttta

SEQ ID NO: 1580 - DNA, 221 bp, Homo sapiens
  misc_feature 1, 11, 12, 13, 15, 16, 23, 28, 32, 40, 48, 49, 51, 52, 60,71, 75, 84, 89, 110, 113, 114, 116, 120, 124, 127, 129,134, 135, 136, 141, 148, 149, 150, 157, 158, 159, 163, 165,166, 167, 170, 171, 184, 189, 212, 217, 218, 220: n = A,T,C or G
naaagacaaannntnngcagtgnactgngaancttcttantgggctanntnntccaggcntgaagcacctncgtnatctttgangaacnatcccttggacactgcgctgnaannanattnaccnacnancatannnctcanatgcacnnngctcgcnnntgcntnnnggnnttggtacttaccntgtantgtgatgacaatactctgcctcnaccanntnt

SEQ ID NO: 1581 - DNA, 220 bp, Homo sapiens
  misc_feature 12, 13, 15, 18, 20, 24, 31, 35, 37, 40, 44, 54, 62, 63, 64,71, 72, 74, 83, 84, 85, 92, 110, 191, 203, 207, 210, 213,215: n = A,T,C or G
aaaagacaaaanntntgnanaggnctgggangctncntantggnctacataatncagccctnnngcacctnngngatctctgnnnaactttnccttggtgactgtgcttnatccacattaaccatgcttgcatattgtctcacattcaccaagcttgttcctgccttggggcctttgtacttaccatggtntgttttgagaanactntgnctnangatat

SEQ ID NO: 1582 - DNA, 391 bp, Homo sapiens
ccacagcaccagcctcttctctagaacttgctactcttaactcctttaatatcaaacttctttacccttcaaggtcccttcagcatggcccttgccctcctgtctcttctttctctgcctctcgctgtaactcactgctcacacttttacctctgcatctccacacaccaaaccttccaacaaaacaggcttctctctgcaggcaattcacatccctcacctccttcaaactctacctcgaaactcctcttttccagaaagcgctcggtctccctggttccagtccctcattacctggctcacgtaatgctctgggtatcagaggacctgggctatagtcctggtcctgccacctgttggctgttatggtcttatgtattttcttattttt

SEQ ID NO: 1583 - DNA, 372 bp, Homo sapiens
  misc_feature 211, 268, 370: n = A,T,C or G
ccagtgaaaggaaacaaaactggcagtttgtccatttgaatatcagacctagtttcttcttaatttccacactatttctcccatattccttaaacttcttggcatccttcatgccttacagctacccagatgcaataaagtcattgtacagtatttcttacaatataagttatatgcaatgttcagcattttttttttttcacagcactanagaccctgttaaataggggatatgagtcagaatggcttattcacagatggggtccanattcagtggttggaacacagacaccacagtgagctcctttgcaaagtggcaaacataattttgctttctgccttcaaaaacatatatccatcgcgtttaggntt

SEQ ID NO: 1584 - DNA, 221 bp, Homo sapiens
ctgctgcttcagcgaagggtttctggcataaccaatgataaggctgccaaagactgttccaataccagcaccagaaccagccactcctactgttgcagcacctgcaccaataaatttggcagcagtatcaatgtctctgctgattgcactggtctgaaactccctttggattagctgagacacaccattctgggccccattaaataccgtagagccctctc

SEQ ID NO: 1585 - DNA, 375 bp, Homo sapiens
ctgatttttatttttcttcttgattctcttctacagtttccaaattctctacaatgaacatgtacttctttttaatatcaaaagacaaaagaattggtacgtaaaaagaacatccttcccatcttcaaggtcaagattgaacgctgactcctgcaggaagtcttccaggattcccaggcaggaatgatggctccctgtccctgtagctccaggagttcttgcttcacgcacgccccacataccagactgaatgttggcaggaggagtgaccaggtcggtcatctgtgtccctaccacctacaacaggccagcaatctacccgtgtgtgtttgttggacagaattaaccatgatgggcggccgagggcgcctggag

SEQ ID NO: 1586 - DNA, 267 bp, Homo sapiens
  misc_feature 31, 54, 89, 117, 127, 140, 153, 156, 165, 175, 179, 203,223, 236: n = A,T,C or G
aaaaaaatccccactgtcatgaacataaatngaggttttcagcccgggtataanctgaatcaaaaaaaggaaataaaaaatccaatagngtattaaacatttttcactcatttgccntactgacagngcaaatacaaatntggactaaatgtncanactctcaancaacaatgtncagntttcttcgtcctccatgctaaaanatgtaaaagcttaagggtcnaacaataccaatngtataggcttcaaaaaccatctaagttaggg

SEQ ID NO: 1587 - DNA, 299 bp, Homo sapiens
  misc_feature 28, 56, 235, 287: n = A,T,C or G
aaaattcatggaagtaataaacagtagntaaaatatggatactatgaaaactgacncacagaaaaacataaccataaaatattgttccaggatacagatattaattaagagtgacttcgttagcaacacgtagacattcatacatatccggtggaagactggtttctgagatgcgattgccatccaaacgcaaatgcttgatcttggagtaggataatggccccaggatcttgcngaagctctttatgtcaaacttctcaagttgattgacctccaggtaatagttntcaaggttttca

SEQ ID NO: 1588 - DNA, 329 bp, Homo sapiens
gatgacttcatttctcaggacagaatgacacaaacacaagaagcagtctctagggctggctgagaccacatttatctgttctcctaaaagcactagctcagctcccaaaagaagaattacaaatctgagaagttagaggaaaggtacagaataggaattctgattaacaagaaaaatcaattaatgacattggtactctattcttcatatcagtaataatacaaactcagcccttttaaatcagagaatctgccattctatatctaataaagtagctttacaacccctaaagtaaaagaattacatgaaggtgtaaaccaatttgcctc

SEQ ID NO: 1589 - DNA, 303 bp, Homo sapiens
aaaaaatttgatttagcattcatattttccatcttattcccaattaaaagtatgcagattatttgcccaaagttgtcctcttcttcagattcagcatttgttctttgccagtctcattttcatcttcttccatggttccacagaagctttgtttcttgggcaagcagaaaaattaaattgtacctattttgtatatgtgagatgtttaaataaattgtgaaaaaaatgaaataaagcatgtttggttttccaaaaaaaaaaaaaaaaataaaaaaaaaaaaaaaaaaaaaaaaaagcttgtac

SEQ ID NO: 1590 - DNA, 130 bp, Homo sapiens
  misc_feature 26: n = A,T,C or G
atatttttttcctttgcattcatctntcaaacttagtttttatctttgaccaaccgaacatgaccaaaaaccaaaagtgcattcaaccttaccaaaaaaaaaaaaaaaaagaataaataaataacttttt

SEQ ID NO: 1591 - DNA, 123 bp, Homo sapiens
  misc_feature 13, 25, 38, 61, 97: n = A,T,C or G
cctaaagagctanagaagcaagtangggccagggccanagtcggcttcaatggaacaacancccagtgccctaaggcccctaactcttgctggctgnttcttgaccccaagccagggttggga

SEQ ID NO: 1592 - DNA, 614 bp, Homo sapiens
  misc_feature 513, 606: n = A,T,C or G
ctgaagaaacaggtataaatttggcagccagtaattttgacagggaagttacagcttgcatgactttaaatatgtaaatttgaaaatactgaatttcgagtaatcattgtgctttgtgttgatctgaaaaatataacactggctgtcgaagaagcatgttcaaaaatatttaattcacttcaaaatgtcatacaaattatggtggtttctatgcacccctaaagcttcagtcatttagctcaggtacatactaaagtaatatattaattcttccagtacagtggtgtttcataccattgacatttgcataccctagaataatttagaaagacatgtgtaatattcacaatgttcagaaaagcaagcaaaaggtcaaggaacctgcttggttcttctgagatggtctcatatcagcttcataaacattcattctacaaaatagtaagctaacatttgaacacaatttccaagataaagcatattttctcataaataatgaagtctttttctcangcacctcagaagtatacaaaagaatttgagtttgaacagatctcttggaatgtgtttaacctggtatttcaacagacttaagatttccagggnttcacaag

SEQ ID NO: 1593 - DNA, 460 bp, Homo sapiens
aaaatgtccagaataagcaaatctccatatagaggaagtagattagtggttgcttcgggatgggaggaatgggaagattgaggtctttcttttgcagtgataaaaatgtcctaaaattgactgtagcgatggccacacaactctgaatatgcttaagaccattgaattacacactttacgttggtgaattgtatggtatgtaaattatagttcaataacatagttacaaaagataatcaaaagcatgaaagcactattgatgtggtttggatctgtgtcctcaccgagtctcatgttgaaatgtaagccccctggtgggaggcgatgggattatggggcagagtcctcacaaacggtttagcaccacccgctcagtgctgttctcctgatattgagtcctcatcacatctggttgcttcaaagtgtgtggtgcctcccctctgtctccctcctgctctgg

SEQ ID NO: 1594 - DNA, 226 bp, Homo sapiens
tgacaatcctggaaatctgttctccagaatccaggccaaaaagttcacagtcaaatggggaggggtattcttcatgcaggagaccccaggccctggaggctgcaacatacctcaatcctgtcccaggccggatcctcctgaagcccttttcgcagcactgctatcctccaaagccattgtaaatgtgtgtacagtgtgtataaaccttcttcttcttttttttttt

SEQ ID NO: 1595 - DNA, 204 bp, Homo sapiens
gttctggaagcaaaaggcccaaggtggagtattcagaagaggagctgaagacccacatcagcaagggtacgctgggcaagttcactgtgcccatgctgaaagaggcctgccgggcttacgggctgaagagtggtctgaagaagcaggagctgctggaagccctcaccaagcacttccaggactgaccagaggccgcgcgtccag

SEQ ID NO: 1596 - DNA, 483 bp, Homo sapiens
  misc_feature 21, 58, 59, 61: n = A,T,C or G
aaagacatgccaatttgaatnggcatcaaagtaaaaaaataaaagcaaatgctaaaanntnctttacaataaaaaaattaaataattggcaggttaaatgaatgtaaaatgaggaatgtacagtgaaaaacaaactaatataaagcattccagttgataaaaacctcctcaggcttatggtttgttttccaaggaaattatgtttcaatgtaaagtttgaaatactccagacatacattccatgtaggttttgggtgccaatgttaaaatttcaaattttgcatgcaaggcttagcaaagaaacactggcagaattccagcatttgcaaaattctaagttttggtgaatattgtaaatattacaattggtattagaaagccatgatgaatccagaattaagagaaaacccatttcataaatattttgtttgattaaaaaataccaggcttaccatgttctaaataattcaagaaaacatcttt

SEQ ID NO: 1597 - DNA, 165 bp, Homo sapiens
  misc_feature 56, 59: n = A,T,C or G
aaatgaagaaaccatgcctttaggggcccgtgaacacagaaccctcaagacaaggntgntttatctggaggacacatctagctgccattgcaacctcactgggctccccagactctgtgtgtgagaaattaaaccccctgcttgcttgaaaaaaaaaaaaaaaaa

SEQ ID NO: 1598 - DNA, 472 bp, Homo sapiens
  misc_feature 22, 464, 471: n = A,T,C or G
ctgcaccattttcaggatcatnttgatatcctgcatgggcattgcaaaaatcttcagcttcttacagcacaggcgtagtacatttttctttcgcttcactttctcaatgaggtaggagaacaattcatcacaggcaccttccttgaggaacaggtctacgagcacctctactggaatgaagggctgctctgcctctgtgctcaaaccatctacttttcgcttctttgtcatgggctgagctgcttctggctctggaaatgagtacagactggccctgtttccagaccatacagtccagaagtcctgatgagagttcttccgtaaatccagcacttgaagtttccacctcctggggcgaacctcctgggcaaggagcacatcaagtccatcaagcacagctttgaaggtctccaggtgaagatgttgtcccttcatcacgcactcccagagggaggcaggtgaanggccagng

SEQ ID NO: 1599 - DNA, 193 bp, Homo sapiens
  misc_feature 22, 54, 58, 61, 180: n = A,T,C or G
ccagggctggtgttgggccttnagcagcatcttccggtgctatcctcccctccnaccnttnacagctaaagccaagtccagcggccgcagtcttcacctctccacactcactttttatctggtgtttttacttctgcctgcgtttgctctctagccaataaaccgtccttgtgtgcgagncaaaaaaaaaaaa

SEQ ID NO: 1600 - DNA, 370 bp, Homo sapiens
ccacgcaggtcagtggtaatcaaaactctgctagagccagaacgaaactccctcataatcacgtctcgttccttttggtccatatctccatgcatggcggatacagtgaaatctcgagcatgcatcttctcggtgagccagtccaccttcctccgggtgttgatgaagatgactgcctgggtgatggtcagggtttcatacaagtcacatagtgtgtccagcttccactcctctcgttccacgttgatgtagaactggcggataccctccagggtcaactcttccttcttgacaagaatccgaatggggtccctcatgaacttcttggtcacctcaagcacatcagaaggcattgtggctgacagcaaaa

SEQ ID NO: 1601 - DNA, 548 bp, Homo sapiens
aaaaaaccttcaatcaacaatatataaataacttaatctgaggtaagagggaaaaatgccctgcaaacactttagaaaaacacatctctgccacactacagaaatagacctttaccacatcttctgaatccccagttccctccatctaccaaagattttgggcaccagaactaaagatgagaatctctcccacccctaccacttccaggtaaacacaaagttcatgttcagccaggctaaagtacaagaaaactgaacccactctccatcccaccccatcctaggataggtggggccagggcagaaatcatggaatgctcaggactccacccctcccaagtgcactgaggtaagttctggaactgagcttcctcccaacgagccactcacctcctctgggagttcattcacctcctctcccttcctcaaaggacaatgtttaatctctgaaattcctcttgccttgtcagcagccaccatctggctgccactccaaccagtcctcaaaagaactcagcctccaaccctgaccccaaatctgtccaacc

SEQ ID NO: 1602 - DNA, 402 bp, Homo sapiens
  misc_feature 23, 219, 325, 335: n = A,T,C or G
ctggagacccaagttcccttctnattgctcagggtttaggtgtgtcatctgcctcaccccactcccccatacatcatgccctgtgacttgatgcttcatcttgcatggttcatgactggcgccatgggcactggaaaggtgtggtttccaagaccccttcctaccctccatccagtagctgtcaaagggaaacttggtgaggtcagctctctcactcanaagggagacagggaaaaaggcagaaaggaagggagctgttaggatacccaacagaatcccatctggccttggtgcccctaaaggctgtaaaacttggtacttttgngttcccagangctatttatccaaggtggctagtaaattgccttactgatccaatgggttccccccaccccaccttgg

SEQ ID NO: 1603 - DNA, 485 bp, Homo sapiens
  misc_feature 20: n = A,T,C or G
aaatgttgaactgagctaangatgcactttcttgtggacatagaaggggcccacgtaaggccctgagtaggctccttagttgctgctttacctgatgagggccaaagagattaactctgcctcgttgccatgtctcagaaaagttgccatatttcacccagaaggggctcgtttttctcttactcttactttaaccatgtgcctggaggagccattctgggctcttgcacttgcccagcctttctttgccaggggcagagaagggaaagggggtagattgagtgtgccaagggccgtgcaagggcaggcttgctttccacccatctgctgagggagccctctcccctcgctccttgcctctgttcacacctgttgtcttggaagaggatggtccctttgtcttaaggctttgtgataaagtcatctccagttaggatctgcacctgtttccttcgtaatagtgcctggcggcctttctgaagtta

SEQ ID NO: 1604 - DNA, 424 bp, Homo sapiens
ccaatcagtttgcaatttataaacctgtcactgattttttccttcaacttgtggatgcaggcaaggtggatgatgccagagctctcctacagagatgtggtgcaattgctgaacaaaccccgattttgttgttgttcctccttaggaattctaggaaacaaggaaaggcatcaactgtgaaatctgtgttagaattgattcctgaattaaatgaaaaggaagaagcatacaattccctcatgaaaagctatgtctcagagaaagatgtcacatctgctaaagcactgtatgaacatttgactgcaaagaatacaaaattggatgatctgtttctaaagcgttacgcatctttgctgaagtatgctggagagcctgtccctttcattgaaccccctgaaagctttgaattttatgcacagcagct

SEQ ID NO: 1605 - DNA, 527 bp, Homo sapiens
  misc_feature 475: n = A,T,C or G
aaaaggctagaacatcctttgacttcttgaaaatctgcatgtctggcttgggttttattaccacatgcctgagttcttcaagaatggaaggctcaagtattctcatcttccatttgccaaacttccttcctgatttgagtcacgtgttccacttggaaagaaagggaacagagagcctcctccatggacagtgtatgaatttcattgggaatcttgctctctcccgcctctatgcctttctctctttttaaccttactttacataatattatagatgggccaagaaaagaaaagatgacataacattttgatgaattacacctattccattcttcacgtttcagaattggtcgactttgttagaagataattgaagtagccttgggtcaaaagcaaccttttcaattgtgatcatacctaaaacatataaaaaccctgccgtagattaaaagcaattataaaatcataaaattgnatgtttgcagaatcctggagcagtagatttctttgtctttggcctgcggact

SEQ ID NO: 1606 - DNA, 536 bp, Homo sapiens
cctgtctccaaggtcccttagagcaacccatacaaccaacaggctgcgtacactaccaaggaagctgctgtgtgcagccatcgcacactgggtccccatgaggaaaggaactcagtcggcttaattggctgcggagcatcccaagaaccactgaaaaggcgccactgggctcctctgccagcttcagctacctgctggcaagatggttgtcattcagctaaaagcaagaagagctactcccatcaccagtgtttcccctaacctgtggggaagagcttgctaagacttactcatgctttgtttgtatctgcaggaaggggtcctgagtgaccactgaaagtcacttgccagcctggcttttctagtagccatagtggctgagtcactggggccacctctatgctctgataaaataatgcaagcctaataatgtagagactccaactgccttaaaaggcccagaccaagctcacctgtcagccccagcacaggacaacatcttgttgatgcggatgacgtggaaggggtggagccgc

SEQ ID NO: 1607 - DNA, 124 bp, Homo sapiens
tacgtgatagatgttacgctgccttgttgaaaatttcactgactttgattttattacttttttaatgatagttatcaaacttgtatttaagctgcttgtcatttatggaatattgaacttattt

SEQ ID NO: 1608 - DNA, 327 bp, Homo sapiens
aaaaccaaaaaaaaaaaagagagagagattaaaaacagtgcattacaaaaacaaaaatcaaacttccttaagtggcacttctgaaagttgaactgacactaccagaagaaatttaggccagttaagacagggatgttcttactcaattggtcattaaaaacatccacttgtttgtaatacgtatttataattactttttgatgattgaaaaatagaacaaggttttactaggtttacttatgacaatgactagacaaccagagatccaactggcttagccctacttatccaaaagtacatttccaataagaatatacttcaatgatt

SEQ ID NO: 1609 - DNA, 208 bp, Homo sapiens
  misc_feature 200: n = A,T,C or G
aaaggctttctttgagctcatttgtaggcttatctacctactgagtaaagtagttgggtgtcctaattttattaataggattaatttttattataaatcattagagatgttttgatactttagttaaaactgctttttagtaaatttgtttttctttgcagatatgagggaaggcaccattggagatatggctatcctgngtataaca

SEQ ID NO: 1610 - DNA, 425 bp, Homo sapiens
  misc_feature 63, 360: n = A,T,C or G
aaaatcaatggtgatgttcttttttaagcaacattcttctcttccctaatagctacaagtatnatacagtacgcaacagctcacttgaaagtgctagaatcagaggataaagaagccataagccaccccacttacatttcctactatacaatgcctttttggcgcttgataaatcaagcattcatgtagcattacattcaacagaaacatttctcgtactttgggtttaagatccttgtccctccagttcggatgtcgtgacatctgactcttcatcattgtaaatattttcagccatttgccatatctgcatgatgttatcctcagacactgagcaaatgacccaaggctcattggggntccagctaaaatctgaaatcttagcagtgtgtcctccatgaataaacaggagttctggaggccca

SEQ ID NO: 1611 - DNA, 332 bp, Homo sapiens
  misc_feature 22: n = A,T,C or G
ctgggggcactgaatctactantaacacaagcaattcactctgggaattctgtcaaatatggtggtatctgttaaaagcttggaagtagaaaagggccagttcatcttgatcatacaaattagggaatgcacccacaactgcaataccctcaggcagtatgccaacattgaaatagaaagcatctctaaaaagcactgttcctccatgggtgaagactggtattaggaagtgcacacacaatttttgggtatttgttgcaacaggaacacgtggatttatgacactcaaacctagacactgcaaagttaactggtaagattttttttttttt

SEQ ID NO: 1612 - DNA, 546 bp, Homo sapiens
aaacaacaagacgcttgacttgaagggaaaactatctaggattcttttttgttttagagtaatttatccctacttaaagacagattgccctacatgtaacagctacgtacaaaaaagttataaaattgtccttggttttacaatgataaatgaaaaacattaaaattctccaattgaacaaggtatgcaaggatttttatgttgttgttttttttttttgttaaaacagtgagagcaaaataacttactggaatataaagataagagctgaatgagcatgccactaatggagaaagggggtattttcacagaatcagtatttttccccatcccgtctccacttgatgtcaatcaaaacataccattggctgtttagttaaaaaaaaaaaaaatgcaatatgcttgtgcacatataccagttactttatgtacaataaaggaatggggaagggggaaatgaaagaatagagaaaactatacggtagtagtcaggatgtggtggaaccaaattgcagttttctaattgagaatgtaatcttggtcttt

SEQ ID NO: 1613 - DNA, 546 bp, Homo sapiens
cctacttgtttgcagcttccacacactgcacctacctactacctctcttccatgcttaactgggtttagaaaggtgagctatgcgtagaagaactacttgggatattcaagtgctgtatttgaacgataagcctatagataacagtctgaagctgcaagggagactttgttagtacactactataaacaggtaaactacctgtttgtacttgatatagtgcatatgaaatgactgatttaatacaaaactacagaacatgcaaaattttttctgagatgttaagtattacttcagtggagaacaaaacttacttaacctttcgctaatgcatgtagtaccagaaagcaaacatggttttagcttcctttactcaaaatatgaacattaagtgttgtgaatttgtctgccaagtggttcagaaatacattataaataacctagttaaaaaaagaaactgtgaaccatcttggtcagtctattctattctatgtttatatgttattttctcaagcaatcgcttcataattatagggtttacaaaaagg

SEQ ID NO: 1614 - DNA, 314 bp, Homo sapiens
  misc_feature 60: n = A,T,C or G
ctgatgcggtggtgcgtgtgatttgtcaaaagaaagccttctggatgctgttaagatgtncccttcaggtgaacctggtatcagacccacagtacttgctgtttgagaaaaaataaaaacaaaaaggtcacctgttctccagcccttttctcttacctggtatttccttcctttctcctcccccaccccaaataaaaaaacaaaaaacactagaatttatttatatgtattgatgttgtaggtctaggtgaaaaaaaaagaagtaaatgtttcactgctctatttatgaaaaaaaaaaaaaaaaaaaaaaaaag

SEQ ID NO: 1615 - DNA, 319 bp, Homo sapiens
  misc_feature 21, 64, 203, 219, 290, 298, 310, 312: n = A,T,C or G
aaatatcacaagtaggtcttnagtgtcatctggcatcttctttctgtagccaggggatttttanatcttattcatcagcctgctgaacagttcctttttcagagacatagataccatccaaaaatttcctgatatccttgtttttaactgttgtggcttgctgaatcaaagccgctgaatttgaaacaagctcaatgtcattnccttcaaggattaatncatctttctgggcttgagatactgaacaagcaacacctggtctcatcctaaccctgcggatatatttttcncccaaganatcgccggattncnacaagag

SEQ ID NO: 1616 - DNA, 408 bp, Homo sapiens
ctgattaaaacatgtgtgagctgaaggcaggcgatctgtggacctgtcatctcgatggatctgaaacttctgaatgccattcatgccttcgagggcagcaaagccttgcaggggtaccttggaagtacccgtgacaaactggaggaacttggcacggtcagcttgatcgaaagaacgcaatgctctccagaaccactggatctgaatagagttggactggtacttgtggtattcagtgttggatttcagatcatcgatgtcaatggtgggcagtcctgatataagcagctctaactcctgctcagtgaagatggaaatgaggcgctttggaatgatctcatagaagccttctaagaaagccgccaactgcttgcggatggctcctgtcattctcatctggcataccag

SEQ ID NO: 1617 - DNA, 378 bp, Homo sapiens
  misc_feature 56, 60, 64, 295, 344, 355: n = A,T,C or G
aaatatcacaagtaggtcttaagtgtcatctggcatcttctttctgtagccagggnactnttanatcttattcatcagcctgctgaacagttcctttttcagagacatagataccatccaaaaatttcctgatatccttgtttttaactgttgtggcttgctgaatcaaagccgctgaatttgaaacaagctcaatgtcatttccttcaaggattaattcatctttctgggcttgagatactgaacaagcaacacctggtctcatccgaaccctgcggatgtatttttcacccangaaatttcggatttcaacaagagacccattctcctggataacaacgttngatggggaagngagcatacacagacctcatcttg

SEQ ID NO: 1618 - DNA, 334 bp, Homo sapiens
aaaatgttacacaaatttctttatgataggacttctcagagcttttagcattctaatgcagagtggaaatgtgaatggcaggattcagtataatcagcacgtcccaactctatctgaacacagaactcttgttctgcatatcatcgatttgcacaccctggaacaacgtttggtagaaatcaacttgggaaatgttgcacagcatgagtgatgaatacagctaagttaggatcaaagtacaggcgtatctcgttttactgcacttcactttactgagcttcatagatattgtgcttttacaaattgcacgtctgtagcaatcctacattgaaca

SEQ ID NO: 1619 - DNA, 394 bp, Homo sapiens
aaatacatataagttattttacatttcttccatatgaaaccaatttattctgctgagtgatttcacagataaaggtgttacttacttgacttcaccatgacaagaaaaggacaagtttttttaagcagcatctttatgaattttttatcagtggcagatattttaatgggctgcatttttacaaattcctgatatattctggagacctgtggtacatttttgctactctggagatataaattaaattagcatgatgtattgccaaggaccaccacgtggattgtctacattgtgatccatgaggcactgagaggactcggccctcagatacaactcccctgggtagatgcccaggcagaacccagcaaatgtatatgcatctctgggctctgag

SEQ ID NO: 1620 - DNA, 490 bp, Homo sapiens
  misc_feature 22, 433, 477, 479: n = A,T,C or G
ccatccacgatgtcctctgacngtgtgaggatgtactggcccttgtagtagttgatgagattgaggtactgcagagtggagatgacatcctccttcttgatgctggtgatttcactaatctcattgatggtgatctgtggcctctccccgctctccgacttcagccccatcaggatctccaggatggtctgggaccagtagcttcgataggataggaggccaaggtctgagaggggcttctcaggggtccctgttttcccttccactttggagagttcatagctgaactcgatcagcagcttgccgtagccccggcgctggtagggaggcagggttaggatgcaggccacattgtagtcttccgttgattctttctccttggagaagtagcccacgatgtggaagcccttacagtcatactctgtcatgacgnagaagaggaaagggtctgtgtcatagtacagtgtcttatggtcnangaaacacttgg

SEQ ID NO: 1621 - DNA, 243 bp, Homo sapiens
cgcatatgcactcaaaatgctctttgtaaaggaaagccacaacatgtccaagggacctgaggcgacttggaggctgagcaaagtgcagtttgtctacgactcctcggagaaaacccacttcaaagacgcagtcagtgctgggaagcacacagccaactcgcaccacctctctgccttggtcacccccgctgggaagtcctatgagtgtcaagctcaacaaaccatttcactggcctctagtga

SEQ ID NO: 1622 - DNA, 484 bp, Homo sapiens
  misc_feature 21, 55, 59, 60, 397, 442, 471: n = A,T,C or G
aaaaatgtaacaaacatcttnatatctgacaataaaatctgaaatgctgtaactngggnnattaactgcaccatccaaattcttgtgacttacgcatttttgcccaatttaacctttctgatgttcccctgcccccagacaccataaatgcattgtaattttgaaaatatctgccaactacacactgaaaattttaacctgatcaattgacataatataaaatctgtcccaaagcactgaaacaagaaaatctataccatcatgctacagacgtacttagaaaacttaaaaggaagagtaaatatcagctcagtgatttataatgaagctaataaaattcaggccagtattcttaagtgtaatgaacattatttgaacattcaacacatgaaaggtnaacaaaggctatgaacttggtgtaacttaaaacgtttcagatgtngggagtctaccagatgtaattggattcangtggatcccgtcg

SEQ ID NO: 1623 - DNA, 278 bp, Homo sapiens
ccagttgcatttcccctgcaggcttgagcccaagccagagccttgaaaaggtattcaggttgttgcccaaaacactgaaaaaaactggccctggccctgaaccaaataccttgaaccctcgtaaactccataccctgacccccttgttttggatatacccaggtagaacaactctctctcactgtctgttgtgaggatacgctgtagcccactcattaagtacattctcctaataaatgctttggactgatcaccctgaaaaaaaaaaaaaaaaaaaa

SEQ ID NO: 1624 - DNA, 229 bp, Homo sapiens
  misc_feature 7, 164: n = A,T,C or G
aaaatgntcatgtagaaaattaatgaactataggaatagctctaggagaacaaatgtgctttctgtaaaaaggcagaccagggatgtaatgtttttaatgtttcagaagcctaactttttacacagtggttacatttcacatttcactaatgttgatatttggntgatggttgagcagttgctgaaatacacatttagtgtatggaaatacaagacagctaaagggctg

SEQ ID NO: 1625 - DNA, 400 bp, Homo sapiens
  misc_feature 62, 63, 367: n = A,T,C or G
ctgaaacgttaactcagagggtcttttggagcaagtagttttcagaaagcgtctgctctttnngacggtaaggatcctctacaagggcacgtgcagatccaggcgctggagcgtcaggcatgggcaccattttcatgcttcaactcaaactccaggtggtagtgagctcaacggtccctcattccacaaaacatgacagcaaattcatcttctaaaaaaagttttgttttgtttttacccattcaacaggaaaaaaaattagacacacacgatgaaatttacaaccagcagcatcatccatcacactgtctgtactaccagatcctacacttaaagctcagcattattggtataaaaacttaagacngcattagaattcttaagaaaaggtgtaaaattt

SEQ ID NO: 1626 - DNA, 360 bp, Homo sapiens
  misc_feature 97, 156, 183, 273, 292, 303, 304, 311, 341, 343, 351: n = A,T,C or G
gccgctctggaccgtctcaaggtgtttgacggcatcccaccgccctacgacaagaaaaagcggatggtggttcctgctgccctcaaggtcgtgcgtntgaagcctacaagaaagtttgcctatctggggcgcctggctcacgaggttggctggaantaccaggcagtgacagccaccctggangagaagaggaaagagaaagccaagatccactaccggaagaagaaacagctcatgaggctacggaaacaggccgagaagaacgtggataanaaatattgacaactacacngaggtcctcannacccacngactcctggtctgagcccaataaagactgntnattccctnagaaaaaaa

SEQ ID NO: 1627 - DNA, 584 bp, Homo sapiens
  misc_feature 309: n = A,T,C or G
cttgaagtccagtgtttccacggctggatacctgtgtgtctccataaaagtcctgtcaccaaggacgttaaaggcattttattccagcgtcttctagagagcttagtgtatacagatgagggtgtccgctgctgctttccttcggaatccagtgcttccacagagattagcctgtagcttatatttgacattcttcactgtctgttgtttacctaccgtagctttttaccgttcacttccccttccaactatgtccagatgtgcaggctcctcctctctggactttctccaaaggcactgaccctcggnctctactttgtcccctcacctccaccccctcctgtcaccggccttgtgacattcactcagagaagaccacaccaaggaggcggccgctggcccaggagagaacacggggaggtttgtttgtgtgaaaggaaagtagtccaggctgtccctgaaactgagtctgtggacactgtggaaagctttgaacaattgtgttttcgtcacaggagtctttgtaatgcttgtacagttgatgtcgatgctcactgcttctgctttttctttctttttatttt

SEQ ID NO: 1628 - DNA, 163 bp, Homo sapiens
gcctggacgtacaataccactttcgctgtcacggtaaagtccgccatcagaagactgaaggagttgaaagaccagtagacgctcctctactctttgagacatcactggcctataataaatgggttaatttatgtaacaaaaaaaaaaaaaaaaaaaaaaaaaa

SEQ ID NO: 1629 - DNA, 390 bp, Homo sapiens
  misc_feature 21, 22, 60: n = A,T,C or G
aaaccttatcctaggaggacnntttcacattgcgtctaacctcttcctggcctcttaatnttgggttgttaaatcttatttgctttatttccttggttcctctaagttgtaatctcggagttaaaaacagctttagaaccccgcccccccaaaaaaaaaaaaaaaaacttttgagaatttttttcaaataaatgtccattgcatagaatgggtctgtgactggctgcttctacatctgcacccaacatctggcccccttcagaactctgagtggacaggatcaggatttgactcaggaggattagaatgtgaagaatccgtgtttgagggattcagttctccaactgcctcaaagggtctcaagtttgcataagtcacctcctgggccag

SEQ ID NO: 1630 - DNA, 496 bp, Homo sapiens
  misc_feature 61, 419: n = A,T,C or G
ccacatggttgatgatgggtgcaaagttggtagggccatagaggcgaacttggggcagggnttggcggtaggcatccacaatgccctggatgcctgcacagtaggggttactggggttgaaattcaaggcaaattcatgcgagacctgccagtcagggggaacctgggccccaaatccaaatgcagggaacagcttgtctgagtcatagtcctgaaccacgctgcccacactccacagtgccatcaggtactcattgacccctgttggactcaggtagtgtagggagtcaggtgaggaggggtctccattggagccagtgaagtccacgcccacagtgaagttgatctgacagcctcccatcacatagtccagaaaggagtactctgtttctacccgacaaatcttgacacggatagtnccagagttcttgtagcttttctttttctgctgcttctcagggtggatgcattcaaactcagccgggactgcctgcag

SEQ ID NO: 1631 - DNA, 310 bp, Homo sapiens
taaccgaaccctggctacctacagctacaaagaagctttgaagcttgatgtctactgttttgaagcgttcgatcttttaacatcacatcacatgctgacagcacaagaagaaaaagaacttcttgaatcactaccccttagcaagctgtgtaatgaagaacaggaattgctgcgttttctatttgagaacaaattgaaaaaatataataagcctagtgaaacggtcatccctgaatctgtagatggcttgcaagagaatctggatgtggtagtgtctttagctgagagacattattataactgtgatttt

SEQ ID NO: 1632 - DNA, 446 bp, Homo sapiens
  misc_feature 20: n = A,T,C or G
ccaggagctaagcttgagtntcctttactgaatttcgttcttagtgcaggttacttgtagattctagtcttcacaggctccctggggctcttaactagtcacactgggagtcatgaatgtctttccaataattcagggaattctagagatcctcaaactgtaaggtctattcatactcaacacaaggaaaaaacctcattaaaattaatgactaatcaggaagcaacgtaaccaaaagcacagtgaatgaaagttttcatggtaggttcaacatgggtttattgctagaaagatccaggggatagctttaggtttaacttcggctcaccaacgtaactttctaatcatttatttcaagtaatagctagaagtgggtctgaatgttttcccagagtctgatacgtgtttttttttgccagaagagaggtcttcaggagacttcattt

SEQ ID NO: 1633 - DNA, 300 bp, Homo sapiens
  misc_feature 59, 60, 267: n = A,T,C or G
aaattaaaagtgccctacctttacctaaatggctagcagacatggagaacaccacagtnntgaatccacagagctttctccatgtagctataacaatgtgttgtcgaatggcacactgtcaaacactggaaaggggcgccacaatggacctctctcttttataggaacgaatgctagattcaactatctcaactaagcaggaagtgggttcttctgctaggaatgccaaccctaattcactttgtcttgaaatatatacagattgtntgtagtagctacggcaatgatattttccttggg

SEQ ID NO: 1634 - DNA, 307 bp, Homo sapiens
  misc_feature 297, 301: n = A,T,C or G
acgggacccgctatggggcctccctccggaaaatggtgaagaaaattgaaatcagccagcacgccaagtacacttgctctttctgtggcaaaaccaagatgaagagacgagctgtggggatctggcactgtggttcctgcatgaagacagtggctggcggtgcctggacgtacaataccacttccgctgtcacggtaaagtccgccatcagaagactgaaggagttgaaagaccagtagacgctcctctactctttgagacatcactggcctataataaatgggttaatttatgtanaaanaaaaaa

SEQ ID NO: 1635 - DNA, 404 bp, Homo sapiens
  misc_feature 19, 58, 325: n = A,T,C or G
cctgctcgctgggcagacntaccatgtggctgtggtctgctacctgaggtctcaggtnagagccacctaccatggaagtttcagtacaaagaaatctcagcccccacctccacagccagcaaggtcagcttctagttcaaccatcaatctaatggtgagcacagaaccattggctctcactgaaacagatatatgcaagttgccgaaagacgaaggaacttgcagggatttcatattaaaatggtactatgatccaaacaccaaaagctgtgcaagattctggtatggaggttgtggtggaaacgaaaacaaatttggatcacanaaagaatgtgaaaaggtttgcgctcctgtgctcgccaaacccggagtcatcagtgtgatgggaacctaagcgtgggtgg

SEQ ID NO: 1636 - DNA, 531 bp, Homo sapiens
  misc_feature 1, 8: n = A,T,C or G
ngatgatncgccaagcttggtaccgagctcggatccactagtaacggccgccagtgtgctggaattcgcccttagcgtggtcgcggccgaggtccattccagaggactctttagtcatatgcagcaacatgacattttagataccctgtgtaggaccattgaatctacaatccatgtcgtcacaaggatatctggcaaaggaaaccaagctgcttcttgacattaggtgtagcatgtctacttttaagtccctcacccccaacccccatgctgtttgtataagttttgcttatttgtttttgtgcttcagtttgtccagtgctctctgcttgaatggcaagatagatttataggcttaattcttggtcaggcagaactccagatgaaaaaaacttgcatcttcagtatacttcctaaagggcaatcagataatggatatgttttatgtaattaagagttcactttagtggctttcatttaatatggctgtctgggaagaacagggttgcctagccctgtacaatgtaattt

SEQ ID NO: 1637 - DNA, 610 bp, Homo sapiens
ccttgcacaaagatggtgttgttgtctgaattatcctgttcggagtcatgacgtgatccttggtcccgagggcctttagtgacatggaaaaaaagaacaaaaaaaaaacaaaaacaaggaaaagatgagccgttagtcaacaggaaaaaacggacaaggaaaaaaattaacaccaaatccaaacttgtaaaatatcaagtaagtgctcacagcctcactccaaaccctttcctgggtcgcctgcccagaggagaaaattctaggcaggccccttaagatctgtaacttgagtctccacagagacaactccacacttcagaaaatgctgcctcccccagctcaggctgggaaatgtcctcagcacaggtggcaggggaaacggagacccattaaagtgaacaaaccaactcagcttggcccggttctctcacccgagagaagagagatgggctcgccaccagccatgcgatgtgcatccatccagtttctcccaactttaccaccagacacttaacccttgtggaacaatttttaatttctctttagaaaccatccttaaaaccgtgttgtttccccgaaaccacatgaaaataaaaaccatacataatag

SEQ ID NO: 1638 - DNA, 385 bp, Homo sapiens
ccatcttctctaaaacccaaattgcatgtgcactgagaaaaatgttactgcttcaaaacaaccaaaaatgggaaaataactgaagtctagaaacagattttctccttctagactcccagcgggctcggccagcagttccttattcaaaatcaatgtgtctataatcaactctagtatgtccacagttcacccaaatgccagatacattaagactaccaaatacaaacctaaaatgttccccccaaaatttcccttaaaactgttccccaatacctgcaattcacagatataatttagcatttttgtttttatatactaatttaggcaaaacccccccgccactgaatcgtccaacaaaaatgattaatttgatagaaacaaattt

SEQ ID NO: 1639 - DNA, 408 bp, Homo sapiens
aaaaaataaaattataaacaaaatacagaaaaatattgacacctgtgataacaaggaaatgactcttaagggcagtttgttgtcctgggggaaaaaatcataagtgttataaagaaatattattgtgcaaaggaggaatgtaatatttaaggttcatttacaacgggcatttggcgtcgacagaaaaagtctttctatgtatacattcaacattttgcagcatatttacattcaagttacatttccaaattctatgccaaatacagtctaactcaccatcaacaatccctcagatattactaaaatcctgtttatttggtaggagtgcaatattatcttattaggaaataattttatgttcctactaagtcaactgcatttttactactttaacaaaattcgctgaca

SEQ ID NO: 1640 - DNA, 472 bp, Homo sapiens
ctggtaccaataggaaagaagactccagctaatgaaaaagtagagattcaaaaacatgccacaggaaagaagtctccagcaaagagtcctaatcccagcacacctcgtgggaagaaaagaaaggctttgccagcatctgagaccccaaaagctgcagagtctgagaccccagggaaaagcccagagaagaagccaaaaatcaaagaagaggcagtgaaggaaaaaagtccttcgctggggaaaaaagatgcgagacagactccaaaaaagccagaggccaagtttttcaccactcctagtaaatctgtgagaaaagcttcccacacccccaaaaaatggcccaaaaaacccaaagtaccccagtcgacctaaagtcagtgattcaactggaaggaaacctcaatgctgcctccagagctttttggaaatactcagatcctggccgcctttgtaaccttctctaaacgtcagg

SEQ ID NO: 1641 - DNA, 520 bp, Homo sapiens
ccaagtcaaaattgggcccagcgtctttctttctgtcttatgacagaccagcctccagccttggtgtggtatctacatgtagccctgcgtaccctgcttctttttagcattcaaggcccactcagggcctcaaattagccaatggtgaatatggatataggacttttagagggatgcaggttgagttgtacataacttagaggtgaagtgcaggtccgaaacagggctagactttggagaactgtaaaatggctcactgagcatgacagcatcaggacccctggagtggctttcaaacttaccttcttctgcaggctacttctggaaatccctaggacttaccagctttctgaacactgcgcatcatgggagggtgaagaggaaaaggggctagttaaaatcttgcttctactgtgggccgaactcaggaggagccctaaagctaagcccttgggcttgacagctctacttttcacctctaactaccactgtgccaatgagtgccgagtgccaagatcag

SEQ ID NO: 1642 - DNA, 322 bp, Homo sapiens
ctgaacacaagcaaaccttctcaggaggtgtctcctaccctcttattgttcctcttacgctctgctcaatgaaaccttcctcttgagggtcattttcctttctgtattaattataccagtgttaagtgacatatataagaactttgcacacttcaaatcagagcagtgattctctcttctctccccttttccttcagagtgaatcatccagactcctcatggataggtcgggtgttaaagttgttttgattatgtaccttttgatagatccacataaaaagaaatgtgaagttttcttttactatcttttcatttatcaagc

SEQ ID NO: 1643 - DNA, 491 bp, Homo sapiens
aaaattctgatctatgcataaaattcatttttatatcacggttaaatttagtacaaactataaaaatgttaacactgaagttttcaacagaagtctattaagatgccttagaaaaattaaacaacagcaagtcatttactgctatgaggttaatacataaagaaacattcacacattttactgaaattttcagtaaataactttagccataacacttataattaaaagttcaaaagttgtgtgtggctctacagcaattataatttgcaatgaaaacactaagccaaatctttttgagctgatcagaacaatcttagctacaaaattggctgaaatttgcaaaccttaaaaagaacaccaattgtgaatggaataggtatcataacttagcttaaagtggaagatggtaaaaactcgatgcttaagtctgaattgcacaaggaaaatattaggggaaaaaacactcagctattactgatagctattacttt

SEQ ID NO: 1644 - DNA, 538 bp, Homo sapiens
  misc_feature 297: n = A,T,C or G
aaattattgttaaagaatacacaatttggggtattgggatttttctccttttctctgagacattccaccattttaatttttgtaactgcttatttatgtgaaaagggttatttttacttagcttagctatgtcagccaatccgattgccttaggtgaaagaaaccaccgaaatcccccaggtcccttggtcaggagcctctcaagattttttttgtcagaggctccaaatagaaaataagaaaaggttttcttcattcatggctagagctagatttaactcagtttctaggcacctnagaccaatcatcaactaccattctattccatgtttgcacctgtgcattttctgtttgcccccattcactttgtcaggaaaccttggcctctgctaaggtgtatttggtccttgagaagtgggagcaccctacagggacactatcactcatgctggtggcattgtttacaagctagaaagctgcactggtgctaatgccccttggggaaatggggctgtgaggaggaggattataacttagg

SEQ ID NO: 1645 - DNA, 379 bp, Homo sapiens
  misc_feature 207: n = A,T,C or G
aaatagtagagacggggtcttgttatgttccacaggctggtcttgaactcctgggaccaagcaatcctcccacctctgcctcccaaagtgctgggattataggtccaagtcaccacgcccggcctattttattccacttcggagaccgccccccttgtccctcagatgcatccaaatcaggagttagggatcatactccactgtggncctgaattatagaataatgaagtcctagatgtcagcggcccctggctgcatgatagtaagagtatggctgagcctgtcttgcagatcatccagtacctgtacaggccaggctacactgttctccagcactctctgtagccaagtgccagtaatcacagactaggctacctct

SEQ ID NO: 1646 - DNA, 545 bp, Homo sapiens
  misc_feature 303: n = A,T,C or G
aaaaagaattttttttgccctacaaactcatgaaaagaaacttcaccatcttttctcaaaaccaaacctagcaggctctagatggaaaaagtccagaaagcaactcacttgatatgatggaagacaacaaaggcatgtggtgataggctctccgttatccaagggaagccagcaatatgcgggcaggtcactggtgatgggctaggcatgtccaataataaacgagactcagggaatcagagaatcacaggattggaagggactttaagaatgatgatcaaattcatccctcaagcctttaanctccctttcaacatctctggcaaaggctctacactgtgtgttaaaaaaattccctggtatgggacatgcaaggaagacatcccattccaatttaggaccgatctaatttttagacactgctttcatgtgttaaacctaagtaggcttcttggtggaaaggagataatgcttaaaggcaaaaatacaagccacaaccctggagggttgacgtggttcttggttaagaaactgagctgaagttt

SEQ ID NO: 1647 - DNA, 308 bp, Homo sapiens
  misc_feature 180, 206, 273: n = A,T,C or G
ctgaggttgtcagtacaatgaaaccaaactggcgggatggaagcagattattctgccatttttccaggtctttgagttgcacgtcaaatctggggctgatcaccccacacttgtttagcctgcctgtgaggttcacaacaattttcccagctctgtggtcatcaatgatttcaaattcgncaatgtagccatgcttcatcatcacngtgagaaaccggacgatgactttggagcacggcctaataagcacctggcgtttgcctctcttttggngcattgttgatactcttgagagcagctgccaggac

SEQ ID NO: 1648 - DNA, 144 bp, Homo sapiens
gttcttagacatgatcccaaaggcataatccacagaagaatccataaaagaaaaatttgtaaattggactttatcaaaattaaaaacttacttttttgagatggggtcatgctgtgttgtccaggctggagtgtggtggtaagt

SEQ ID NO: 1649 - DNA, 517 bp, Homo sapiens
aaaaggagaaaaaaaaaacctatacagtagtctttccttatgttcattgcacaaaatgagttctgcttttagaactttgacactcaatggttaattttacaatttaagattccaactttataaccttttttctactccaaaacacccttgtaaagtttttctttaggatggtgtaaaaaccagcatttctgcacaattcactggaatttttttctttgtaataaaaatctcttctctgtaaaaccaaaaacaaaacaaaacaaaacaaaacaaaaccaaaagaaaagtcctctacctatcatggtttctgcagctatgcatgtatttctgttttatagctgctttatagctacttcagactccagatctgctttaatgtgtataactgcatccacacgcagcagaatactcttacaatagcaacttggggaaagagatctggaaaaaaaaatacatgagtaccaggaaacaaacacggcccagtaaaatatgaggcaaaaatgcctacaatgagatg

SEQ ID NO: 1650 - DNA, 410 bp, Homo sapiens
aaatgggtaaagccatttacataatatagaaagatatgcatatatctagaaggtatgtggcatttatttggataaaattctcaattcagagaaatcatctgatgtttctatagtcactttgccagctcaaaagaaaacaataccctatgtagttgtggaagtttatgctaatattgtgtaactgatattaaacctaaatgttctgcctaccctgttggtataaagatattttgagcagactgtaaacaagaaaaaaaaaatcatgcattcttagcaaaattgcctagtatgttaatttgctcaaaatacaatgtttgattttatgcactttgtcgctattaacatcctttttttcatgtagatttcaataattgagtaattttagaagcattattttaggaatatatagg

SEQ ID NO: 1651 - DNA, 470 bp, Homo sapiens
  misc_feature 14, 47: n = A,T,C or G
ctgcaccatttttnggatcatcttgatatcctgcatgggcattgggnaaatcttcagcttcttacagcacaggcgtagtacatttttctttcgcttcactttctcaatgaggtaggagaacaattcatcacaggcaccttccttgaggaacaggtctacgagcacctctactggaatgaagggctgctctgcctctgtgctcaaaccatctacttttcgcttctttgtcatgggctgagctgcttctggctctggaaatgagtacagactggccctgtttccagaccatacagtccagaagtcctgatgagagttcttccgtaaatccagcacttgaagtttccacctcctggggcgaacctcctgggcaaggagcacatcaagtccatcaagcacagctttgaaggtctccaggtgaagatgttgtcccttcatcagcactcccagagggaggcaggtgaagggccagg

SEQ ID NO: 1652 - DNA, 587 bp, Homo sapiens
  misc_feature 58: n = A,T,C or G
gtttctttagattcaagagtttcgccacctccgcagcaacctcggggttgtctgcctnaagtgctttcagttctcggacaatgtttccttgttttgtcacttcatccatcagcgcttgtatctgctgtggcttggctgttgtaacagtctctacaactgctggcttcggggacgtttttgcctggagaacaacaaagttatcaccagcaaccataaatatcccctaacctccagttttatacagcatctcagagggaaagtggttacctttaagtcgaaggtctcttctagttaagacaggaaagaaaaactgtaagtgaggaagcggcagggccaaaagatggaaagagtgatgggtgaggactacttagggaaattagggaagtgatgctgtggctgttgtggagcgagggcacagcctttagctttctcacctggccccctccaaagcgctgccttaaactttcaatctggtcattttccaatttttggaacaagggactgactgtgccaatctggtgtcctgctggtaaggtacacaggaagtttgtcagcaggatactgcaggctggaggtgggagctgcag

SEQ ID NO: 1653 - DNA, 271 bp, Homo sapiens
  misc_feature 23, 25, 26, 239: n = A,T,C or G
acactccagaatatatggaaaanannaaacagcgtttgtttgaaaatttgcgcatgttacctcatgcacctggtgtccagatgcaagctattccagaagatgctgttcatgaagacagtggagatgaagatggagaagatccagacaagagaatttctattcgagcatcagacaagcggatagcttgtgatgaagaattctcagattctgaggatgaaggagaaggaggtcgaagaaangtggctgatcataagaaaggagcaaagaaagc

SEQ ID NO: 1654 - DNA, 191 bp, Homo sapiens
  misc_feature 83, 88, 91, 130, 157, 178, 185: n = A,T,C or G
gcaccatccgtctacttacctcccttcgggccaagcacacccaggagaactgtgagacctggggtgtaaatggcgagacgggnacttnggnggacatgaaggaactgggcatatgggagccattggctgngaagctgcagactcataagacagcagnggagacggcagccctgctacngcgaatngatgac

SEQ ID NO: 1655 - DNA, 82 bp, Homo sapiens
  misc_feature 21, 33, 36, 66, 75: n = A,T,C or G
gcctcttcattcctctcccancataacaatcgnggnaacagaatgcgactgctgatttaccgatgnatttaatgnaagtaaa

SEQ ID NO: 1656 - DNA, 288 bp, Homo sapiens
  misc_feature 11, 46, 48: n = A,T,C or G
aaaatcctttnaaaactgtttattatacaagtgagttttgagtgtntnatgggcttatcggtaggatttctggtagcgagcgcgggcaccaggacctccaaactttttggactcgcagcgacgagggtcagctaccagcagggtccggtcatactggatgaggatgtctttgatctccttcttggaagcctcatccacatatttctggtaataggccaccagggctttggagatggactgacggatagcataaatctgggccacgtgaccaccaccctttacacggac

SEQ ID NO: 1657 - DNA, 418 bp, Homo sapiens
atcttattcatcagcctgctgaacagttcctttttcagagacatagataccatccaaaaatttcctgatatccttgtttttaactgttgtggcttgctgaatcaaagccgctgaatttgaaacaagctcaatgtcatttccttcaaggattaattcatctttctgggcttgagatactgaacaagcaacacctggtctcatccgaaccctgcggatgtatttttcacccaagaaatktcggatttcaacaagagacccattctcctggataacaacgttgatggggaagtgagcatacacagacctcatcttgtaacggaagcccagtgtaacacccttgatcatgttctgtacatgactacaaatagtccgaacggtagtcagttcctttctgttaccccaccatttgtcaacccgg

SEQ ID NO: 1658 - DNA, 352 bp, Homo sapiens
  misc_feature 37, 39: n = A,T,C or G
acaggccactgttggtaagatctaaagcatgcagtangnaaacaaaattgataaatattgagtgtgagtaattgggattggggagattgtggcaaactagaggggaagtgcccattgtaaaaacacatccacagacagtccaggcactaaggctgaatgggatcagggtatccagaaatctcaggatctccagggccatgttactgttaggtcaaggtcactggtgcagcaacgaatgtagtttttctagattcctctccctccctgggctctttacctaatgtctttgcggcacaggcggtaaccctgggagtaaagaggtgtggtccaaggaagtagcttttgtgaccag

SEQ ID NO: 1659 - DNA, 579 bp, Homo sapiens
cattgtgtcaaagagtgtgccaatctatttttgtttcagcattggaagtgcactttcccctggggcgtgtgggtgtgtgaatgtgcaagtgtctgagagatactgcatcagccctagacccccagagccagtcccgccctttacagagcagcccttagcctggggccatgggtcaggctgaccttcaacaattatttctagatgatttctggataagaattgctctctcggtaccagacagtttgacatcctccacccttagaaaatgactgacattgttttgttactgctcctacccaccaaggggataaagaaggcgagttctgagtgttggatgagtcagtcgcgtggaaggacgtggagcgtggcgctctgtaacttcctgccgtctgccaccccgccacgtgtatttaaccctcgcactttctccactgtggagatggctggggcggcgccccacagtgtgtattcctgtcctctatgttagagtgcatcagaagcacatttactgtgctatctatatctctatataaaagtgttttataaaaacccagaataggagcacgacgcatgattggt

SEQ ID NO: 1660 - DNA, 269 bp, Homo sapiens
  misc_feature 15, 46, 49, 58, 61: n = A,T,C or G
ctggcccacagcccnccctctcccaggcccgagatgtgacccaccngtntcttctgtnaantcgttagctttaatcaatcatgccctgccttgtccctctcactccccagccccacccctaagtgcccaaagtggggagggacaagggattctgggaagcttgagcctcccccaaagcaatgtgagtcccagagcccgcttttgttcttccccacaattccattactaaggaaacacatcaaataaactgactttttccccccaaaaaa

SEQ ID NO: 1661 - DNA, 383 bp, Homo sapiens
  misc_feature 16: n = A,T,C or G
ccaggctggtctcagnactcctgacctcaagtgatctgcttgcttcagcctcccgaagtgctgtgatcgtaggtgtgagccactgtgcccagctacctcatcaattcttaatctataaaccatggataggcttcgggagaacccaagaaccaatgaaatctgttggtaagttttatgtgtgcggttttctacagagagggtcaacagcatgtatattttcaaagaagtctgtggtgcaaaagagagtttattgttagaagtccttgggcaatcaacttggaaaagggtggattgagaatgggggctgtctagatcaggataatgttgaatttgaccctcacttgaggcttttgtacagaggatgagaagacggtaaattcaag

SEQ ID NO: 1662 - DNA, 369 bp, Homo sapiens
  misc_feature 13, 27: n = A,T,C or G
ccaagtcaaaatngggcccagcgtctntctttctgtcttatgacagaccagcctccagccttggtgtggtatctacatgtagccctgcgtaccctgcttctttttagcattcaaggcccactcagggcctcaaattagccaatggtgaatatggatataggacttttagagggatgcaggttgagttgtacataacttagaggtgaagtgcaggtccgaaacagggctagactttggagaactgtaaaatggctcactgagcatgacagcatcaggacccctggagtggctttcaaacttaccttcttctgcaggctacttctggaaatccctaggacttaccagctttctgaacacttgcgcatcatg

SEQ ID NO: 1663 - DNA, 304 bp, Homo sapiens
  misc_feature 16: n = A,T,C or G
acgttttgtgacaggnaataaaattttaagaattcttaagtctaagggacttgctcctgatcttcctgaagatctctaccatttaattaagaaagcagttgctgttcgaaagcatcttgagaggaacagaaaggataaggatgctaaattccgtctgattctaatagagagccggattcaccgtttggctcgatattataagaccaagcgagtcctccctcccaattggaaatatgaatcatctacagcctctgccctggtcgcataaatttgtctgtgtactcaagcaataaaatgattgttt

SEQ ID NO: 1664 - DNA, 361 bp, Homo sapiens
  misc_feature 16, 78, 239, 306, 336: n = A,T,C or G
aaaaagtattctagcncaagatttttctgtaaactagattatgttgtaaacttttttctaaatcttgtaggagtgtcngttgttaagaactagagcttattcctattccaaatctatcttgcgctcctgaaaaactgcagaaaggcacttgaaagctgtttctttaagatatggatttcttttttattcttgctggtaatatattgctgcactgagtgtgtgcaatttttattcaaggncatcgtgatgctgagaagtttcgttgataacctgtccatctctagtttcaacccgcttaatcagaangtgccctttttgagtgggtatcaaccaganggagtgaaaccagattagttctaaa

SEQ ID NO: 1665 - DNA, 176 bp, Homo sapiens
  misc_feature 38, 170: n = A,T,C or G
aaaatggtttctataaagggttttattgtatgaaatanaactttatatttttgcatatgtatagatagtaattatatttaatgtataactatagcattatggtgagtggaatttgacattgtccaaacctttttcatttttgagtgattaaaaatgaaatgtcctttgtnaaaaaa

SEQ ID NO: 1666 - DNA, 397 bp, Homo sapiens
  misc_feature 208, 213, 358: n = A,T,C or G
ccttcacagcgctcctgtaccctttaattgtgtgtctttctcacagctatccgtcagtccatctccaaagccccggtggcctattaccagaaatgtgagtgagcatgggtccttcccatgaggtaggtgggtgtgtggggatcaagtcaaggactctgtgtgattatctaaatcctcgtccctgctcttcttgccagatgtggatgangcttncaagaaggagatcaaagacatcctcatccagtatgaccggaccctgctggtagctgaccctcgtcgctgcgagtccaaaaagtttggaggccctggtgcccgcgctcgctaccagaaatcctaccgataagccccatcgtgactnaaaactcacttgtataataaacagtttttgagggatttt

SEQ ID NO: 1667 - DNA, 282 bp, Homo sapiens
ctggtgctgctgggaggccagcctggaagaggcagcagtggctcaagtttgcgtgcaggagccagagtgggacccacgggctcttgtgggtgtggtttagaactagatggtgctttggggacaagccatccaaaaaccccaggcccacatccaccctgatttgatatcccacttcctgacagatcagaggctgtgtctttaggcagtggaggtccaggagcagagcctggggctggttcacagctaaacccctccttagggcagcccagagtagggcctcag

SEQ ID NO: 1668 - DNA, 308 bp, Homo sapiens
ctggttccatagactacattagtgtgtttgatgtcaaatcaggcagcgctgttcataagatgattgtggacaggcagtatatgggcgtgtctaagcggaagtgcatcgtgtggggtgtcgccttcttgtccgatggcactatcataagtgtggactctgctgggaaggtgcagttctgggactcagccactgggacgcttgtgaagagccatctcatcgctaatgctgacgtgcagtccattgctgtagctgaccaagaagacagtttcgtggtgggcacagccgagggaacagtcttccattttcag

SEQ ID NO: 1669 - DNA, 472 bp, Homo sapiens
cggccatcttagcggctgctgttggttgggggccgtsccgctcctaakgcaggaagatggtggccgcaaagaagacgaaaaagtcgctggagtcgatcaactctaggctccaactcgttatgaaaagtgggaagtacgtcctggggtacaagcagactctgaagatgatcagacaaggcaaagygaaattggtcattctcgctaacaactgcccagctttgaggaaatctgaaatacgagtactatgctatgttggctaaaactggtgtccatcactacagtggcaataatattgaactgggcacagcatgcggaaaatactacagagtgtgcacactggctatcattgatccaggtgactctgacatcattagaagcatgccagaacagactggtgaaaagtaaaccttttcacctacaaaatttcacctgcaaaccttaaacctgcaaaattttcctttaataaaatttg

SEQ ID NO: 1670 - DNA, 164 bp, Homo sapiens
gttcttagacatgatcccaaaggcataatccacagaagaatccataaaagaaaaatttgtaaattggactttatcaaaattaaaaacttacttttttgagatggggtcatgctgtgttgtccaggctggagtgtggtggtaagtcatagttcactgcagcctcg

SEQ ID NO: 1671 - DNA, 445 bp, Homo sapiens
aaaaaataaaattataaacaaaatacagaaaaatattgacacctgtgataacaaggaaatgactcttaagggcagtttgttgtcctgggggaaaaaatcataagtgttataaagaaatattattgtgcaaaggaggaatgtaatatttaaggttcatttacaacgggcatttggcgtcgacagaaaaagtctttctatgtatacattcaacattttgcagcatatttacattcaagttacatttccaaattctatgccaaatacagtctaactcaccatcaacaatccctcagatattactaaaatcctgtttatttggtaggagtgcaatattatcttattaggaaataattttatgttcctactaagtcaactgcatttttactactttaacaaaattcactgacatttttatcccagttgaagtcaagcctcttttagacat

SEQ ID NO: 1672 - DNA, 292 bp, Homo sapiens
ccttgaacacggattatccccaaacccttgtcatttcccccagtgagctctgatttctagactgctttgaaaatgctgtattcattttgctaacttagtatttgggtaccctgctctttggctgttctttttttggagcccttctcagtcaagtctgccggatgtctttctttacctacccctcagttttccttaaaacgcgcacacaactctagagagtgttaagaataatgttacttggttaatgtgttatttattgagtattgtttgtgctaagcattgtgttagattt

SEQ ID NO: 1673 - DNA, 130 bp, Homo sapiens
ccacagctaacatcattgcagcacctttactccttcggctttttgccagcaccaacattggcctttgcagtccccctgactttcttcattctgttcttgcgttcctttcgttgctttcttgaggtctttt

SEQ ID NO: 1674 - DNA, 611 bp, Homo sapiens
aaagagatttattaaatcatcttatcacaaagatggaaacatatacaaactagaaacatgcaaccatcatcttccacagtcaagtcacaatgtcaaatatttttcttgcctctgcagatgaaaagttcagatcttatacccaactacttactcaccccgaatatttaagtcagtcttcctgaaagtactcagggtagcaagtaacaaaatgcaaacgattatataaagaaagtgcagttaaaagggaaactatgtggcaagtaccctctttcccttcccaccccccaattaaaggcaaacaatggcactttgctcttgcttaacctagattgtcttcaaaaactattaaaatgtaaaagacttaacaaaaaaacaaaaagacgtttaacagatgtcaaaaagctccttagtgtttgaaaataaatgcttaaacaaaagacaacatattttatatcaaacaagtttgaagagccctgaattgcagcattctgtaacataaacaaacaaaaagctggtataggatttattgtcaaaggcagaatttcttcaggcaggtaagtaaggaggtggtggttctttttcaggcattttcacggccatttcataggttg

SEQ ID NO: 1675 - DNA, 558 bp, Homo sapiens
aaaaatatatggtcaggaggagactttacagtttctctttacaaacggtatataatgggagaaatggccttgtggcagaggacagtcccagacagcagccttgccacagctcaagtagacacagtccttactaagtctccacgaagagcagtagctggggagggcttctgatgctcttatttacaatcccacaatcactgctctccttcaagtctagcagtcccactgtatattgcaacttgatcgtactaaagaccgacagcaaaggatacagccagtctcgcctctgtgaagtgttgcagagaacctggagagtgctaatgaaaagctgttttaccaaaaagttgccacgggcaacctcatatacttaggcttatgtttagaaagagcaagggtgctactggtagacacttgaaattcgaagtgttttttgtgaataaaatgtgtttatggtaacttagggaaaagtcgtagtaggacagcaaacatgtggttctacatgtacatgaagttagacaagctgactcccctcctagaaagcctacctttcaggcacat

SEQ ID NO: 1676 - DNA, 498 bp, Homo sapiens
aaattgtattgaacagggcatataaaatgcattctgtaccctgatctggcatatagcttcaaaactgcagtggcgagtgtccatctcttagttagctaccttaactgtccacccttactacctgtgggatcgttgcctggtttgtcttctctgtgtcctggagcaaagccagttcctaaaactaaaactccattctagtcttgggaagaaaagtttctactcagaactggggaaggagtggaacttatgacttgggcctctaggctgtctctgtcccctcagctccccgacatgcatttactctctgccgtgggtctgcagtcgctgcaacctaccctctctctgcctcagccttacacccaagcagtaggtctgtgctctccctgtctctaggtcgctgagagaggtgcttttcttcataaaacctttggggtttggatttccccaggaagatggagaatggaatactcactcttgggtctaatctttccccttgac

SEQ ID NO: 1677 - DNA, 295 bp, Homo sapiens
  misc_feature 19, 221, 282: n = A,T,C or G
aaaatggaaacatcaattntattaacaatttacggcaatagacatttacagaacaaaaataagacagttccaagacaaaggagtgtaaaagtacagcacacaggttaatactcttcaccctcatcctctccgtcagcactatctgctccaacctcctcataatccttctcaagggcagccatgtcctcacgggcctctgaaaactcgccttcctccatccnctcacccacgtaccagtgaacaaaggcacgcttggcatacatcaggtcaaacttgtggtcnaggcgagcccagg

SEQ ID NO: 1678 - DNA, 136 bp, Homo sapiens; identical to SEQ ID NO: 77

SEQ ID NO: 1679 - DNA, 409 bp, Homo sapiens
ccaggctggttttgaactcctgacctcgtgatccacccgcctcagcctcccaaagtgctgggattacaggcgtgagccaccgcgcccggcaagaattcaaagttaaaacaggttaccactttcacctattaccatcaggttgcttatttttgttttatgttttttatttgtatgcatgtttactttatgtttcagtttactaccccctaaggcagcaagagagcaggaagataagcaaaatagagatgtttttgacaacttggcactgagagactatcctaagggaataatctgaaatacataaaaacattttattcacaaaattggtcatcacagcattatttacaatactgaaaatctggaaatagcctaaatttctaacaattgaaagaaggttaagtaaattata

SEQ ID NO: 1680 - DNA, 376 bp, Homo sapiens
  misc_feature 351: n = A,T,C or G
aaaacctttagcatttctgcctataatatttgggttttcttcttttcctatctttatttgataagtcccatcaaatattttccccataatcacaatgttttcttttcactttgctcaagaactgagttatgagctccaaatttggacaaactctacattggctaagttttagtcatttgcactgctaagaaagatgacaattcagcatgctgaagatgacttcctcccttataaaggggctaacacagagggcaatactgttcatgcttctgattcttgatcacaagaattgctttaggcaattacaatcatgtctcctctgacacatcatattattcaagtgagacaganaaagaagatgtcctatgtcacacag

SEQ ID NO: 1681 - DNA, 446 bp, Homo sapiens
ctggcattccttcgacttctctccagccgagcttcccagaacatcacatatcactgcaaaaatagcattgcatacatggatcaggccagtggaaatgtaaagaaggccctgaagctgatggggtcaaatgaaggtgaattcaaggctgaaggaaatagcaaattcacctacacagttctggaggatggttgcacgaaacacactggggaatggagcaaaacagtctttgaatatcgaacacgcaaggctgtgagactacctattgtagatattgcaccctatgacattggtggtcctgatcaagaatttggtgtggacgttggccctgtttgctttttataaaccaaactctatctgaaatcccaacaaaaaaaatttaactccatatgtgttcctcttgttctaatcttgtcaaccagtgcaagtgaccgacaaaattccagttc

SEQ ID NO: 1682 - DNA, 454 bp, Homo sapiens
ccaattgaaacaaacagttctgagaccgttcttccaccactgattaagagtggggtggcaggtattagggataatattcatttagccttctgagctttctgggcagacttggtgaccttgccagctccagcagccttcttgtccactgctttgatgacacccaccgcaactgtctgtctcatatcacgaacagcaaagcgacccaaaggtggatagtctgagaagctctcaacacacatgggcttgccaggaaccatatcaacaatggcagcatcaccagacttcaagaatttagggccatcttccagctttttaccagaacggcgatcaatcttttccttcagctcagcaaacttgcatgcaatgtgagccgtgtggcaatccaatacaggggcatagccggcgcttatttggcctggatggttcaggataatcacctgagcagtgaagccag

SEQ ID NO: 1683 - DNA, 589 bp, Homo sapiens
aaatatcacaagtaggtcttaagtgtcatctggcatcttctttctgtagccaggtaactcttagatcttattcatcagcctgctgaacagttcctttttcagagacatagataccatccaaaaatttcctgatatccttgtttttaactgttgtggcttgctgaatcaaagccgctgaatttgaaacaagctcaatgtcatttccttcaaggattaattcatctttctgggcttgagatactgaacaagcaacacctggtctcatccgaaccctgcggatatatttttcacccaagaaatttcggatttcaacaagagacccattctcctggataacaacgttgatggggaagtgagcatacacagacctcatcttgtaacggaagcccagtgtaacacccttgatcatgttctgtacatgactacaaatagtccgaacggtagccagttcctttctgttaccccaccatttgtcaacccggagcctcttttttttctttccaagaaggctgagttctacattgatgtgattgaagtccctccgcagggttcctctggggcccttcacgataactgtgcgtcccttcag

SEQ ID NO: 1684 - DNA, 460 bp, Homo sapiens
aaaaaataaaattataaacaaaatacagaaaaatattgacacctgtgataacaaggaaatgactcttaagggcagtttgttgtcctgggggaaaaaatcataagtgttataaagaaatattattgtgcaaaggaggaatgtaatatttaaggttcatttacaacgggcatttggcgtcgacagaaaaagtctttctatgtatacattcaacattttgcagcatatttacattcaagttacatttccaaattctatgccaaatacagtctaactcaccatcaacaatccctcagatattactaaaatcctgtttatttggtaggagtgcaatattatcttattaggaaataattttatgttcctactaagtcaacttgcatttttactactttaacaaaattcactgacatttttatcccagttgaagtcaagcctcttttagacaaagtcaatactaact

SEQ ID NO: 1685 - DNA, 362 bp, Homo sapiens
aaaaagtaaacacatgccttttgataaagcggaattgaggtgatcagaaattctgttgagaacccagctatttgtgtgagtatattttagctatcccaaaaactttttctgacctttctctttctgggataggatatgtgtgcttagagtatcattcagaagggtacctaatagttaatctgttaattagttacatcaggtttcaaatactaggtcagtgatatgagagcgagagagagagatttgaattgtcaaatgtattgtcagatgcattcacaagagcaggactgcttatctgttttgttcactactgtacccctagcatctaaatgaatacctagcccatagaataaacccactgg

SEQ ID NO: 1686 - DNA, 273 bp, Homo sapiens
gagagcgagctgagtggttgtgtggtcgcgtctcggaaccggtagcgcttgcagcatggctgaccaactgactgaagagcagattgcagaattcaaagaagctttttcactatttgacaaagatggtgatggaactataacaacaaaggaattgggaactgtaatgagatctcttgggcagaatcccacagaagcagagttacaggacatgattaatgaagtagatgctgatggtaatggacaattgcttcctgaatttctgcaatgatggaa

SEQ ID NO: 1687 - DNA, 460 bp, Homo sapiens
aaactccactgctgaccctgagtgcattcgctatcccctcacctattttgttttgggacaaagtctcgctctgtcacccaggctggagtgcagtggggcactctcagctcactgtaacctccacctcctgggttcaagcgattctcatgcctcagcctgccaaatagctgggattacaggcacatgccacaaagcccggctaatttttatattttttagtagagatggggtttcaccatgtcggccagcctggtctggaactcctggcatcaagtgatctacctgccttggcctcccaaagtgttgggattacaggtgtgagccaccacgcccggcccaagccagaggtcttgtaaggggactcatcccatcatgagggtcctaccctcgtgacctcatctaaacttcccttaccaaaggccccatctcaaataccatcacattgagggttaaggctcca

SEQ ID NO: 1688 - DNA, 390 bp, Homo sapiens
aaacacattttcacaagtttttgagacactggatttctttaattaaaaaaaaaatgccaagaaacattatttatacagggttgattgctttcatgttgttattctgtaccctatagtagcctccatgagaatctggtatttcttgctgcttggaactactttgcagtgattacttggttgcagtccaagtactctcgtttagtctgagcctggagatgttctagacttgcttctcccacctctgagattaggacaggaaaaatgtgaaatttcccaattacaggattatacggtaccatcacatcatttgtggaaattggggtgactgtatagctgggattgggctaaggactgtggtcttatctgtccacatacagccaaaatgcctat

SEQ ID NO: 1689 - DNA, 420 bp, Homo sapiens
aaaaatcattgtccaccaaaattttcaggactttggagttctcaaaaaaaaaatgtgtgtgtgtgtgtgtgtgtgttttaacacttccagcagttaaaaattaagaacacatatggataatcattggtggacgcctattataataaacagaaggaccacaaaaattaaaacaagttctaagaaccatcatatatacaaatttctgtacagaatgaggacaaaaacaattcacccaattaaaaccagctcttgtggtacacatactctttttcagaaaagaacgaacacttatcttcctgtattcatttgtttttccatttgattcagtattcttaatgctgtttccaccccataaattagtaactgttcaatagctgagaaatatcctattttcaattatgcaggggaaatcaggagctt

SEQ ID NO: 1690 - DNA, 437 bp, Homo sapiens
cttgaagtccagtgtttccacggctggatacctgtgtgtctccataaaagtcctgtcaccaaggacgttaaaggcattttattccagcgtcttctagagagcttagtgtatacagatgagggtgtccgctgctgctttccttcggaatccagtgcttccacagagattagcctgtagcttatatttgacattcttcactgtctgttgtttacctaccgtagctttttaccgttcacttccccttccaactatgtccagatgtgcaggctcctcctctctggactttctccaaaggcactgaccctcggcctctactttgtcccctcacctccaccccctcctgtcaccggccttgtgacattcactcagagaagaccacaccaaggaggcggccgctggcccaggagagaacacggggaggtttgtttgtgtgaaag

SEQ ID NO: 1691 - DNA, 488 bp, Homo sapiens
ctcagtgtccaagtccacagccaaattctggaagatatccatgtgtgctgagtgagtgatggtgctcattgaaggtcgctatctctttttgaatgcaattgcaaatcagctccggtacccaaatagccacactcactacttcagttgcaccatgctgtacctttttgcagaggccaatacggaagccatccaagaacagatcacaagagttctcttggaacggttgattgtaaataggccacatccttggggtcttcttattaccttcattgagctgattaaaaacccagcgtttaagttctggaaccatgaatttgtacactgtgccccagaaatcgaaaagttattccagtcggtcgcacagtgctgcatgggacagaagcaggcccagcaagtaatggaagggacaggtgccagttagacgaaactgcatctctgttgtacgtgtcagtctagaggtctcactgcaccgagttcataaactgact

SEQ ID NO: 1692 - DNA, 91 bp, Homo sapiens
aaaaggtattttgaataccattaaaactgcttttttttttccagcaagtatccaaccaacttgtttctgcttcaataaatctttggaaaaa

SEQ ID NO: 1693 - DNA, 396 bp, Homo sapiens
cctggccggaatactgatattctgtgccatgttgtcttttgactgacatcacccagttggtaaacttcactatcccctgatcgccacatctcattagttgctagagaaaatattgtgactggattttttccttccacctgtctcaagacagggtcctgacccactcgcccaagtaagtgcacacgattcagggatctttcaagaaccaaactggtagttgtttcggactcatgtcttacaaactgacgaagtacctgtaatacaggtcttcgaaacatggcttctattttcttttcttacagtctaatctttaggcttttcacagaaacacctcccgacccacgcaggatcacgcgcagccaaaacacacgactccagcacttccttcgcgctggc

SEQ ID NO: 1694 - DNA, 443 bp, Homo sapiens
aaatggtgtctttctatgttgcccagggtggtctcaaactcctgtgctcaagtgaccctcccacctcattctcaagtggctgcaattacaggcaaccagcctgacttaaaacagtatcttaaggtagatggtgattagcacatgtagtatgcttaacatttaatattataataagacatcacagcggctgtctcatgattaaggctgtgttcccttgttggtgaggaaattaattatgacttgataaatagaacatgttttaagaagtggctatatagctctggataaaacgaacaaaagaattagaattcctgcggggaatatatacaagactttatttagtcaagtaaaaaaaaatcactaatgtttaactgaagaaagagaaattgaataatatagttctatttcaacatgtgggttcacagatttattctaaccttcca

SEQ ID NO: 1695 - DNA, 381 bp, Homo sapiens
  misc_feature 330: n = A,T,C or G
ccacttaccctatccttaccctccttatcctcaaagtttgggctgatgtaagactagaggctggccctcccagataacagagaaaagggagccccaaatgcaaccaacctcttgttctattcttgcctgcaaaagaacagaggtttctcaaatgcctcagtccctgagagccatttcttcccctacatcgtctcactttgcttcctattgactgctggtagaaggagatttggggtaggggctagacctccttttatttgaagggggcaagggctgagatgtggtccccaaggggccagaaattcccaagttggtcacaggtggcttaanaagtgtgtggtatgggtttacggatttcctttgaagcctctcttcttctct

SEQ ID NO: 1696 - DNA, 620 bp, Homo sapiens
aaaaaataaagtagaacccagagaaaatgtcaaagctgccgccatgtagcaccagcaaccaattcttgcacttctcttccctgtctcagtaatcccctacagaaggttacatgattggaacaactctttcttccctgcaaagtctgctggtaccaggttataacctggacagtggagagtgtctgccttaggctggtttgtgcaagagggccaccttaggtctccttgaggacatttatcttggcgcagatcttgagggcagggcccagcttgatgttcatggcactcataagatgttcttctttaagtaataaaagggcctgtccatcaatctcctgtgagcgaaattcctctgcaatctcttggcagccttggagagaagcaataaactcgtacacctcctctacactccaacggctgggattactggacaggaacacagggttgatgccatgtaattccggtgtaggtggagctgtattgggattccccaggtcacgttctccatgcccagctcttactgataaaggcccaggagatgttggagagagtgcttcatcataactggaattatctgaaccccggctagagtcttcttgaccccggtggcacttgccctg

SEQ ID NO: 1697 - DNA, 513 bp, Homo sapiens
aaaaggatttttatctttcgtgataaactttgctgtgtaccaggaactataaaaacaaaaacttgttactaaagaaaatatctgaaatgtgataagttcttatgccatgttaatttcatgtgtcaacttcaacatttacatgtattatttcattatgtaaaatgttttagcaatttaatattttgcacagttagcaaactttgtatgtcatttccttcaaggcatcatgcagagttgacatgagatttataaggttttaagttgtttgcatgtgaaaatcaaatacatactttggtagtctttgaatacaaagtcatctgctcttgtttttcaagaattttgagacacaaagttgtatgtaaaggaatatattaatttgccgttttctaggtagatttgctcaaaaagagtgaatcaacttaatatgtacaaatgatagctgtgaaactgtagaatatctttgtgtcaggcttggagttcattgtgacctccaaattttgcctgaaggaccag

SEQ ID NO: 1698 - DNA, 398 bp, Homo sapiens
aaaattgtgtcaatatcttcagtgaactcttaacaatctggggaactgttttcctcaattaccacttcagcaacgttcatacgaaatcaaggcttgccttcatgtcagtgtcaggatcaactttaactcgaagagtttgtgcttgtctctaacatcttcagagtgagctttagggatgcctgaaggatggacagtacaagcaagcagctacttccatgatacagtgggaagataaaaaggcccattcagtccagccgtgacctgtaaatccagcttgccctccccccaccccactggaaaaaaaatccaaaacctttttccaccagttttttacatgtcgcttctctaccaggagattctttgcgtcatctagatgaacacactggacttatatacag

SEQ ID NO: 1699 - DNA, 283 bp, Homo sapiens
ccttaatgtaatacagcagaccactaggtattttagtactccacaaaccatggatttattcctaaactactccatgaacatgcaacctgaagacgtgtgaagatgagtgaaactgatattactcaatttcagtctggacactggctgaatccttcctctcccctcctcccatccctcataggatttttcttgtttggaaaccacgtgttctggtttccatgatgcccatccagtcaatctcatggagggtggagtatggttggagcctaatcagcgaggtttc

SEQ ID NO: 1700 - DNA, 265 bp, Homo sapiens
gttgcaggcaagaagcctgtggtaggtaagaaaggaaagaaggctgctgttggtgttaagaagcagaagaagcctctggtgggaaaaaaggcagcagctaccaagaaaccagcccctgaaaagaagcctgcagagaagaaacctactacagaggagaagaagcctgctgcataaactcttaaatttgattattccataaaggtcaaatcattttggacagcttcttttgaataaagacctgattatacaggcagtgagaaaaaaa

SEQ ID NO: 1701 - DNA, 630 bp, Homo sapiens
aaaaatataacacagtcaatataaacatgtactgggaattataaaccattctttcttctaagcactggatgagatactaaaaacatacagtatcttaccaatagccattaaaataggctaaaatgaaaaagaaaccgttgtaacaaggttactaatcccccaactttcaatgctgagttccttcatcatccatgtgcaatccagagatgacatctagcagggtggtaaaattattctggaaaatgccaactgtacttagacaaaataagttaattctatatggttgtccattaaagttttatgtggctatggttccactggagctaaaaattggcttttaactgtttccaaatcagaactagcagaggagagaagtaaataaagccaatggcactcccttcagaggctcaaaatggttagattttgatgcagatttaaccttagcgagtttcagtcagtccatttagatgatcctgtaggttcatacaaatacactgaaccgttggtttaacttctcttccttcctcaaagtttatgataaagagactcatccctgtattgggagtgactgacataagttcagatatgctcagagtggctggtaagggaacacttaagggcagtccagaa

SEQ ID NO: 1702 - DNA, 661 bp, Homo sapiens
  misc_feature 233, 236, 237, 247, 252, 254, 255, 258, 262, 268, 272, 277,287, 298, 302, 316, 327, 329, 345, 449, 537, 548, 562: n = A,T,C or G
aaagagatttattaaatcatcttatcacaaagatggaaacatatacaaactagaaacatgcaaccatcatcttccacagtcaagtcacaatgtcaaatatttttcttgcctctgcagatgaaaagttcagatcttatacccaactacttactcaccccgaatatttaagtcagtcttcctgaaagtactcagggtagcaagtaacaaaatgcaaacgattatataaagaaagngcnnttaaaaaggnaactntnnggnaagnaccctntttnccttnccaccccccnattaaaggggnaacnatggcgctttgctnttgcttaaccnanattggcttcaaaaacnattaaaatgtgaaagactcttagcaaaaaaacaaaaagacgtttaacagatgtcaaaaagctccttagtgtttgaaaataaatgcttaaacaaaagacaacatnttttatatcaaacaagtttggagagccctgaattgcagcattctgtaacataaacaaacaaaaagctggtataggatttattgtcaanggcagaatttnttcaggcaggtaantaaggaggtggtggttctttttcaggcattttcacggccatttcataggttggcaaaacgtactgaggaggtgcttcaaaggcagggtacacagcaaat

SEQ ID NO: 1703 - DNA, 623 bp, Homo sapiens
aaaagatgtagataaaattttattaataacagaagacttaaaaaacattggaaatacttttttcaaatcccagaactgggagatggctattaaaaaatatgcagaagttttaagatacgtggacagttcaaaggctgttattgagacagcagatagagccaagctgcaacctatagctttaagctgtgtactgaatattggtgcttgtaaactgaagatgtcaaattggcagggagcaattgacagttgtttagaggctcttgaaatagacccatcaaataccaaagcattgtaccgcagagctcaaggatggcaaggattaaaagaatatgatcaagcattggctgatcttaagaaagctcaggggatagcaccagaagataaagctatccaggcagaattgctgaaagtcaaacaaaagataaaggcacagaaagataaagagaaggcagtatatgcaaaaatgtttgcttagaaaggattcagttttgcttattgtgtgttgattgtataaatgcaataagaaaatgtaaaggtttttgtctgtgaatatgatccctaatgtgtttcttttgacaccttagttccttactgtttacagtttaggagtactgataggggtt

SEQ ID NO: 1704 - DNA, 350 bp, Homo sapiens
aaatccttgaggggtacagcatcactcggattctgtgtccaatggccttagcaggaagattgcttcggaatttggcacgaaccatgccactgtttccatgggcccgagttacttttccccagatgactctggttttgtttggtttgccgccaggagtgactgtgttgttctttgctttatatacataagcgcatctcttgcccaaatagaattctgtttcatctcgggcgtaaacaccttcaattttaagaagagctgtgtgctccctttggttccggagaccccgcttatagccagcaaaaatggccttggaccacagccttccagacatagttccttttagaagtccc

SEQ ID NO: 1705 - DNA, 483 bp, Homo sapiens
tttttttatgacactggatttctttaattaaaaaaaaaaatgccaagaaacattatttatacagggttgattgctttcatgttgttattctgtaccctatagtagcctccatgagaatctggtatttcttgctgcttggaactactttgcagtgattacttggttgcagtccaagtactctcgtttagtctgagcctggagatgttctagacttgcttctcccacctctgagattaggacaggaaaaatgtgaaatttcccaattacaggattatacggtaccatcacatcatttgtggaaattggggtgactgtatagctgggattgggctaaggactgtggtcttatctgtccacatacagccaaaatgcctatccagaaatccagttcgttggaaaggaaaattggtactcctgtgccacaggggttccagaaaagggaagtcactttaccttgcggtggtgggatcctgatgtctttca

SEQ ID NO: 1706 - DNA, 460 bp, Homo sapiens
aaattcaaaacaggtatctcaaaaataaagttaatataggtttataagtaggacttgctcactcctgaaagtacgtttaagtaaatctccaaacacatttcaaatactctcagagagtctgttttatactaccaagtatcttatccacatttcttcaaaataaacaaaaaaatgctcacaaaatatctatgagaaacaagaagataaaatataaaatcttaatttttacgtataaaataaggaagccggtgaatagcaatgctagaaataaaatgctagatctcctaatccccttcccaagtttcatccagaaagataacagttaaaaaaaaagtaaataaaagcttaaaaaaatcccaaagtcatttcaaaaagaaaagcggctgcatcgtcttctgcaggttagaggtagtaaaggcggtttgacagtgacagatttggctctctgtgaatactctgg

SEQ ID NO: 1707 - DNA, 391 bp, Homo sapiens
aaaaaacattttacttggccgggcacggtggctcacacctgcaatcccagcactttgggaggccaaggcggggtggatcacaaggtcaggagttcaagaccaacgtgacgtgaccaatatggtgaaaccccatctctactaaaaatacaaaaattagctgggcgtggtggcacgtgcctgtaatcccagctacttgggaagctgaggcaggagaattgcttgaacccgggaggcagaggatgcagtgagccgagattgcgccaccgcactccagcctgggtgacagagcaagactccatctcaaagaaacaaacaaaaccactttacttactgtattgtgacatgtttattaagcatgaacccctatcagtactcctaaactgtaaacagt

SEQ ID NO: 1708 - DNA, 155 bp, Homo sapiens
  misc_feature 54, 56: n = A,T,C or G
aaaaacactgtaaaattctaaatgattccttctgttgtaagttgatatatattngnaacctttgtgaaattgtattcatatgaaaatgtcagctcaaattcttgggagaacattaaattatgtaatatttaattaaaattttgaattcaaaaaaa

SEQ ID NO: 1709 - DNA, 511 bp, Homo sapiens
aacactagccatgtgacagtgctataaaactcccagtgtgcttttgtcaggggtgggtgggaggtgcctaattacccatacaagggcatcattcccactgggtatgcaggggcagaaccacagtagtaaattctaaaattatttcaagtatgttcgtataacggaaaatctcactggatggggccgttttaagaacgcttcttagtgatgatcctgtctgtgggacataaggaagaagcattgaaaggcactattttgaaagaatgctgcacaggtatggcaacagccccaagcacattccttcctcacgagtcccaggtccagctttattacctaatacaagtccaacctctggaacatccaaattcgctgttccaaagtttaattaaaaacacaatttacaaatatttaatatcttctgaaaagcatttctaagttaagaatgaaaaagtatgtacataatatataatcaaataccaggcagcctcaacttccaccaggtccacactca

SEQ ID NO: 1710 - DNA, 503 bp, Homo sapiens
aaatatgaaaaaccaaagggaagtgagtgggaagaggcaagagaggaaaggaactggagtttcttgggaagggactcccatgtctcccttcccatttatgggcttggggtctggggtacgaggctcacacagtgagtttgcagtgacacagctccttgtagatctgccgacgaagtttgggcatgtcctgctgggtgaagctgaatggctgagacagggccagatgcttgcagtacattttgaagtaacctttccagccctggtggaaatccagtcggtctttctttaccgcctctgcctgtagatacttggcaatatgcttagggcagcggcggtttagggtacgctgcgagtcaaaataggtgatggtgcgtcgcctcacatcaacagagatgagggaccaatgcacctccaggtggatggggattagcagtagctccttattgaagatgtccacgtttttggtccaccttttcaccccatcataacccttggtacggagt

SEQ ID NO: 1711 - DNA, 520 bp, Homo sapiens
  misc_feature 15, 16: n = A,T,C or G
ctgatcttggcactnngcactcattggcacagtggtagttagaggtgaaaagtagagctgtcaagcccaagggcttagctttagggctcctcctgagttcggcccacagtagaagcaagattttaactagccccttttcctcttcaccctcccatgatgcgcagtgttcagaaagctggtaagtcctagggatttccagaagtagcctgcagaagaaggtaagtttgaaagccactccaggggtcctgatgctgtcatgctcagtgagccattttacagttctccaaagtctagccctgtttcggacctgcacttcacctctaagttatgtacaactcaacctgcatccctctaaaagtcctatatccatattcaccattggctaatttgaggccctgagtgggccttgaatgctaaaaagaagcagggtacgcagggctacatgtagataccacaccaaggctggaggctggtctgtcataagacagaaagaaagacgctgggcccaattttgacttgg

SEQ ID NO: 1712 - DNA, 382 bp, Homo sapiens
  misc_feature 314, 332, 352, 375: n = A,T,C or G
aaaacttaattctcaccttgagtatgcaaaatacaaactccacaaaatgttcattttactttgtagtttacaaatatacaaaatagacgtttgcttaaatttatattacatatttattaaggcaaggaactatatagaaaaacacatttgttctgcttaaggcatacttgggaataaaccattgtacaaattattgcacatctgaaaccacagtgcataacagactgcataaaaatgctaaagaagtaaaccaggtatattacctgacttaggtcataaatgttgatcggaagacaaatatagattttccttgncaaagtatgcagcagttngaaaactttggcttccttgnttgggcctttagaaccaagactnaccaagc

SEQ ID NO: 1713 - DNA, 492 bp, Homo sapiens
ctgctgtttacttatcaaggttatagttcgtgcttctaactggagcactagctgctaatgcatatctagagaaaaaaatcttcctttgcagttagtgccaaaaggattcaaggcttgtctggctgcaaaatgagatttttatcaggcatcttgagcattattataaagcagatgacagtatcgtgtttggggtagtgaaattaaagcccataccaaagtgggccagccaagagcaggtgtcagcctgggacagatgtgaacaccaggaataaaagagcagttatgtaatccatttcgacgcacttctggaactgtaaactgtaaacaaatgctgcaaaggttaactattttctaaaacttacttttttccagtgggaaaacaaatatttggtatggtaacccaaacttatcactgcttttttgctcagtttcacacgttgtaactcaaattactctaaacgtgtttaactgccaaacagctacctgcatgtt

SEQ ID NO: 1714 - DNA, 410 bp, Homo sapiens
aaacatcttcaggaaatgcagggatcattttgtttggaattttaagacacaccagaacacatagtatttacaaagaaacttttacagatacattaattgaaaagataccatcaagaaatataattttgaaatctccctttcttgccaattgatcagaatgcaagatgagatgctaaccaaacagccctttagctgtcttgtatttccatacactaaatgtgtatttcagaaactgctcaaccatcagccaaatatcaacattagtgaaatgtgaaatgtaaccactgtgtaaaaagttaggcttctgaaacattaaaaacattacatccctggtctgcctttttacagaaagcacatttgttctcctagagctattcctatagttcattaattttctacatgaacatttt

SEQ ID NO: 1715 - DNA, 367 bp, Homo sapiens
  misc_feature 318, 338: n = A,T,C or G
tttttttttttgatcctgccacaatatttttaattacgtacaaagatctgacatgtcacccagggacccatttcacccactgctctgtttggccgccagtcttttgtctctctcttcagcaatggtgaggcggataccctttcctcggggaagagaaatccatggtttgttgcccttgccaataacaaaaatgttggaaagtcgagtggcaaagctgttgccattggcatctttcacgtgaaccacgtcaaaagatccagggtgcctctctctgttggtgatcacaccaattcttcctaggttagcacctccagtcancatacacaggttaccagtgncgaacttgatgaaatcagtaatcttgcca

SEQ ID NO: 1716 - DNA, 652 bp, Homo sapiens
aaaaaataaaattataaacaaaatacagaaaaatattgacacctgtgataacaaggaaatgactcttaagggcagtttgttgtcctgggggaaaaaatcataagtgttataaagaaatattattgtgcaaaggaggaatgtaatatttaagattcatttacaacgggcatttggcgtcgacagaaaaagtctttctatgtatacattcaacattttgcagcatatttacattcaagttacatttccaaattctatgccaaatacagtctaactcaccatcaacaatccctcagatattactaaaatcctgtttatttggtaggagtgcaatattatcttattaggaaataattttatgttcctactaagtcaactgcatttttactactttaacaaaattcactgacatttttatcccagttgaagtcaagcctcttttagacaaagtcaatactaactcaaatgttgccagttataaaattatataataatcttttcctccctccttagagacagtattacaactttcaatgaaaggacaccagctatgataaattattttcttttacaagagttaggatgtattacagatacaaggttccagaattttaacttgttttcaaaagatggctgaagcacttttccctttcag

SEQ ID NO: 1717 - DNA, 52 bp, Homo sapiens
aaatgtgtatttcttaagaattcaaatttgtaataaaactatttgtataaaa

SEQ ID NO: 1718 - DNA, 338 bp, Homo sapiens
aaaacaggcacaatattctaaaggcatatgcattcaccatgggcttttgaatgtcctcactcccaacttcacaatcaaaatctacagaagcggcaaaagatcagagttcagagggctatttttttttccctttccttacttaaggttgcaaacacattgacagaggcaaaataaacacgtttcatagcagaaagaccaaaaaattgaatgtaaaccatagctctcccttgggagattacacaaatacaaggttcatctgtacttagaacaaggctcataacttcttgtagcatggacattcaacaggcacagagcaacaacattcacccaaataccag

SEQ ID NO: 1719 - DNA, 229 bp, Homo sapiens
aaaagtcaaagttagatcaagagaatatttcagagttttggtttacacatcaagaaacagacacacatacctaggaaagatttacacaatagataatcatcttaatgtgaaagatatttgaagtattaattttaatatattaaatatgatttctgttatagtcttctgtatggaattttgtcacttaagatgagctgcaaataaataataccttcaatggaaaaaaaaa

SEQ ID NO: 1720 - DNA, 510 bp, Homo sapiens
ccagtacaaaggcttataccagccagtttgtatcccttgtgatgtttgcccttatgatgtgtgatgatcggatctccatgcaagaaagacgcaaagagatcatgcttggattgaaacggctgcctgatttgattaaggaagtactgagcatggatgacgaaattcagaaactagcaacagaactttatcatcagaagtcagttctgataatgggacgaggctatcattatgctacttgtcttgaaggggcactgaaaatcaaagaaattacttatatgcactctgaaggcatccttgctggtgaattgaaacatggccctctggctttggtggataaattgatgcctgtgatcatgatcatcatgagagatcacacttatgccaagtgtcagaatgctcttcagcaagtggttgctcggcaggggcggcctgtggtaatttgtgataaggaggatactgagaccattaagaacacaaaaagaacgatcaaggtgccccactcagtggact

SEQ ID NO: 1721 - DNA, 637 bp, Homo sapiens
aaacttcatctctccaaagctccggtctttggctgtaccctcccagactagtacacatttgttggttttcttcacagcttcctcatcagactcctcatcatcatctccctttgtgttagatgtctgttcatcccactttatccgatgcagcataagacgcttaaatttcttctgggccttggggcccccttccactactaccacgttgacatccttgtgcagtaccaccacccctgtcaggtacagttgcccagcattggcttcaatcttgaacttcttggctgggttgctcaaatttcgaactctatatacagatatgtgtaccccctgtgaaatgtcttctttaagctttttaattttcttgacctttctctgttctgctgtgagttttcgggcagcgttggcctcttcatgcgctttctgtctttttgccatctgagctctgacgtgggcttctaccttcgtggggtcttgaacagcttctgttcctaatactcgcatcaaattagaaattctcactttgggttctggaggaggcatcaagcccagcctgactttttcttgtagttccttctgtgcttccctccttgtttgtctccgaagttttttctgttccttcttggtaagatatactccc

SEQ ID NO: 1722 - DNA, 267 bp, Homo sapiens; identical to SEQ ID NO: 436

SEQ ID NO: 1723 - DNA, 492 bp, Homo sapiens
cctagttccagtcccaacccaaccactattcagaatgagaatctaaaaagcatgacacataagcgaagccaacgttcaagttacacaaggctctccaaagatcctccggagctccatgcagcagcctcttctgagagcacaggctttggagaagaaagagaaagcattctttgagaaaaacaagcaaaggagaagagtgttactgtacccttatgacagaattgtcctggattttgactccatccacgcccatcacctttctacattttgctgacagataactaaccgatgatgaggccgaggtaaaagagacatctgcagtgtgacagaagggagcatgagaagcatggctcaccagccagcctctgtggtctttgtaattagaagcttcagaactcactaatactactgtacctttcattggcgcattaccccataaaactttttgagacgaggtgagatctgagtataaagataggtcagaagtatttt

SEQ ID NO: 1724 - DNA, 513 bp, Homo sapiens
ctgtacttcattcaaaaagccaaaatagagagtatacagtcctagagaattcctctatttgttcagatctcatagatgacccccaggtattgtcttttgacatccagcagtccaaggtattgagacatattactggaagtaagaaatattattataattgagaactacagcttttaagattgtacttttatcttaaaagggtggtagttttccctaaaatacttattatgtaagggtcattagacaaatgtcttgaagtagacatggaatttatgaatggttctttatcatttctcttccccctttttggcatcctggcttgcctccagttttaggtcctttagtttgcttctgtaagcaacgggaacacctgctgagggggctctttccctcatgtatacttcaagtaagatcaagaatcttttgtgaaattatagaaatttactatgtaaatgcttgatggaattttttcctgctagtgtagcttctgaaaggtgctttctccatttattt

SEQ ID NO: 1725 - DNA, 572 bp, Homo sapiens
  misc_feature 561, 569: n = A,T,C or G
aaaggtatttgctcattggtctggcttagagacaggaagacatatgagcaataaaaaaaagattcttttgcatttaccaatttagtaaaaatttattaaaactgaataaagtgctgttcttaagtgcttgaaagacgtaaaccaaagtgcactttatctcatttatcttatggtggaaacacaggaacaaattctctaagagactgtgtttctttagttgagaagaaacttcattgagtagctgtgatatgttcgatactaaggaaaaactaaacagatcacctttgacatgcgttgtagagtgggaataagagagggctttttattttttcgttcatacgagtattgatgaagatgatactaaatgctaaatgaaatatatctgctccaaaaggcatttattctgacttggagatgcaacaaaaacacaaaaatggaatgaagtgatactcttcatcaaacagaagtgactgttatctcaaccattttgttaaatcctaaacagaaaacaaaaaaaatcatgacgaaaagacacttgcttattaattggcttggaaagtngaatatangag

SEQ ID NO: 1726 - DNA, 608 bp, Homo sapiens
aaatagtagagacggggtcttgttatgttccacaggctggtcttgaactcctgggaccaagcaatcctcccacctctgcctcccaaagtgctgggattataggtccaagtcaccacgcccggcctattttattccacttcggagaccgccccccttgtccctcagatgcatccaaatcaggagttagggatcatactccactgtggtcctgaattatagaataatgaagtcctagatgtcagcggcccctggctgcatgatagtaagagtatggctgagcctgtcttgcagatcatccagtacctgtacaggccaggctacactgttctccagcactctctgtagccaagtgccagtaatcacagactaggctacctctgctgggccagaaatagctgcctgaaccaggagctcacagcaccatccactctcatcaccaaagctatgcccaggagaagtcccacgctgctcacaatgaagcccacagcctcaaatatgaacttaggggcaaacactttccagaccatgagatgcctgcgaaggatggaggctgccaaggcacaggccagaatctgaataccaaggataaagaggtacttgaggcccag

SEQ ID NO: 1727 - DNA, 178 bp, Homo sapiens
  misc_feature 173: n = A,T,C or G
aaaaagtttaggtttaaactgtataattttgaatgcttaatgttgttgcttttgaataaagaaaagtacaaagtttttcatctaatcagttcctgcatatctgatgtactgtaatgcataaataatagatctttggtgtgataatttgtgaagcaataaagggcagagaaccngaaaa

SEQ ID NO: 1728 - DNA, 336 bp, Homo sapiens
aaaagaccaaatgtaggttgtcattatgttatatataattatagctttgtaggtatatgcattctccccgctctgttcaggttttcaagggtaaggtttagttcatataaataagcatttattgagtgcatactatgtgccaggtgctgtttatatggctgggtgtgcaatgatgaataaaacacagtccctgccttcaaggaccttacagactggtgagaatgtctgggagacagtgtgatcaaatgcctctgtagatgggtcttgcagtgagcttatcagggtgctgctgtgattagaggtggggagccttggattcttgagtaactctcactg

SEQ ID NO: 1729 - DNA, 325 bp, Homo sapiens
ccaatatggtgaaaccccatctctaataaaaatacataaattagccgggcgcagtagcatgcacctgtaatcccagctacctgggaggctgaggcaggagaattgcttaaacccgggaggcgaaggttgcagtgaaccgaggccacgccattgcactccagcctgggcgacagagcgagactccatgtcaaaaaagaaaataaataaataaaacttgttagaataaaaagtttagggattccccccgtcaatcctgtctgtacatatgagtgaattgagaggtctggaaacatacccacccactgttaacactgttgattttttt

SEQ ID NO: 1730 - DNA, 566 bp, Homo sapiens
aaacttacgccgcttatgtatttacacataaagttactgtatatataaaaaatattttcaaggactcatgggcttgggaatattcaaaagacattattgctacatttcaatatttacaaaaaaagccacaaaataatttcaaacattaagccactgcaaagaaacatctgatgtaagaaaaaattataaaaatataaactttcaagaatatccaagacaaaactctcaatgaagtgcccctgaagtacctagacatctataactaacaaccacttttcttactatcattgaagtcaatagaaacacaaaggaatttttcagacaaagtatggcaaacaacaatctcttgggtgacaacacaaccccaaaatctgttaactttggaaaggtgcgagagcatagaactccagtgcaaatggttacttccagataacggccacagttctctaaatgtagtctaagaaatgtagaagggggaaaccataaaggcaacatacctgaatctttcaagacaacacacaaactctgccatgtacacatttgccttttatattgggcagtgagga

SEQ ID NO: 1731 - DNA, 731 bp, Homo sapiens
  misc_feature 66: n = A,T,C or G
tggcagcctcagctctgtgcccctcaccctgctccctctcgccccttctctcccaccccttccttntgagccgggccctggggattggggagccctcttgttcctgatgagggtcagggcagatgaaagtgttgaaaagaggtcaaatggaaacaaaggctcttacccgctgtatttcagacaggactgaggcacttagccgaggagccactgggttattagattaatttcaaaagagcttttacaagttgcttaattccyttttttttttttttttttttcaaaaacccatgaaccacaaactcaaatttctcctcaaatggggttaatytgacaaatgaggcatggacccagccttgtggaaaaagcattccacgctaatgagatcttggtctttcttgtgaggctacgttatttatgtaaatatgtctggaggcaccttctctaagcttttagttttctatgatctattagtttagtgtttattaaagaatcaaatgtatagaattaccaggcattcgtggggaatgctgtgtagcaaatgtaaaactgacctgctcggaagaaacgtaggaacgcttcaaacccactgtaatgtttggtttgagattattttcattgctttgagagtgaactgcctaagagtaggccttataataaatgctatgtgcgtcttcagtagttccaagctaaagcaatttggcattctcccactgtgatttgtgactttt

SEQ ID NO: 1732 - DNA, 1131 bp, Homo sapiens
tggcagcctcagctctgtgcccctcaccctgctccctctcgccccttctctcccaccccttccttctgagccgggccctggggattggggagccctcttgttcctgatgagggtcagggcagatgaaagtgttgaaaagaggtcaaatggaaacaaaggctcttacccgctgtatttcagacaggactgaggcacttagccgaggagccactgggttattagattaatttcaaaagagcttttacaagttgcttaattcctttttttttttttttttttttcaaaaacccatgaaccacaaactcaaatttctcctcaaatggggttaatctgacaaatgaggcatggacccagccttgtggaaaaagcattccacgctaatgagatcttggtctttcttgtgaggctacgttatttatgtaaatatgtctggaggcaccttctctaagcttttagttttctatgatctattagtttagtgtttattaaagaatcaaatgtatagaattaccaggcattcgtggggaatgctgtgtagcaaatgtaaaactgacctgctcggaagaaacgtaggaacgcttcaaacccactgtaatgtttggtttgagattattttcattgctttgagagtgaactgcctaagagtaggccttataataaatgctatgtgcgtcttcagtagttccaagctaaagcaatttggcattctcccactgtgatttgtgacttttaaacccacaaaataaaagctttttggtattgattgtttttaattaaaaatacttccaagtataaattgaaacggatgccacccttgaagatttactggcgggaatgctcactcttgtcgttttcctcagtatcgttcatgtctttggcaacaagaacacctgatgaaagcaagcaatgctcagttcccatcaacatttctagttagggggattctcataaccccacagtttacctgagaaagttttctgtgttagaagaatggggtcgagagtattaccttttagctcagtgtggccgggccttttgttgcagtcaaatggcaaatacgcactccttggaatggcttcttttatttggttttgttttcttagacttataaatttgaaaagaatgcaattt

SEQ ID NO: 1733 - DNA, 5641 bp, Homo sapiens
cggaggaggacgcgagccccttgcgggcggtcatcacagcccagcctcggggctgccacagcgcgttgcgcctgtgcgccctcggtccccgcgtccactgagcgccgcgctcggggatggggcccggccggccggcccccgcgccctggcctcgtcacctgctgcgctgcgtcctgctcctcgggtgcctgcacctcggccgtcccggcgcccctggggacgccgccctcccggaacccaacgtcttcctcatcttcagccatggactgcagggctgcctggaggcccagggcgggcaggtcagagtcaccccggcttgcaataccagcctccctgcccagcgctggaagtgggtctcccgaaaccggctattcaacctgggtaccatgcagtgcctgggcacaggctggccaggcaccaacaccacggcctccctgggcatgtatgagtgtgaccgggaagcactgaatcttcgctggcattgtcgtacactgggtgaccagctgtccttgctcctgggggcccgcaccagcaacatatccaagcctggcacccttgagcgtggtgaccagacccgcagtggccagtggcgcatctacggcagcgaggaggacctatgtgctctgccctaccacgaggtctacaccatccagggaaactcccacggaaagccgtgcaccatccccttcaaatatgacaaccagtggttccacggctgcaccagcacgggccgcgaggatggtcacctgtggtgtgccaccacccaggactacggcaaagacgagcgctggggcttctgccccatcaagagtaacgactgcgagaccttctgggacaaggaccagctgactgacagctgctaccagtttaacttccagtccacgctgtcgtggagggaggcctgggccagctgcgagcagcagggtgcggatctgctgagcatcacggagatccacgagcagacctacatcaacggcctcctcactgggtacagctccaccctgtggatcggcttgaatgacttggacacgagcggaggctggcagtggtcggacaactcgcccctcaagtacctcaactgggagagtgaccagccggacaaccccagtgaggagaactgtggagtgatccgcactgagtcctcgggcggctggcagaaccgtgactgcagcatcgcgctgccctatgtgtgcaagaagaagcccaacgccacggccgagcccacccctccagacaggtgggccaatgtgaaggtggagtgcgagccgagctggcagcccttccagggccactgctaccgcctgcaggccgagaagcgcagctggcaggagtccaagaaggcatgtctacggggcggtggcgacctggtcagcatccacagcatggcggagctggaattcatcaccaagcagatcaagcaagaggtggaggagctgtggatcggcctcaacgatttgaaactgcagatgaattttgagtggtctgacgggagccttgtgagcttcacccactggcacccctttgagcccaacaacttccgggacagtctggaggactgtgtcaccatctggggcccggaaggccgctggaacgacagtccctgtaaccagtccttgccatccatctgcaagaaggcaggccagctgagccagggggccgccgaggaggaccatggctgccggaagggttggacgtggcacagcccatcctgctactggctgggagaagaccaagtgacctacagtgaggcccggcgcctgtgcactgaccatggctctcagctggtcaccatcaccaacaggttcgagcaggccttcgtcagcagcctcatctacaactgggagggcgagtacttctggacggccctgcaggacctcaacagcaccggctccttcttctggctcagtggggatgaagtcatgtacacccactggaaccgggaccagcccgggtacagccgtgggggctgcgtggcgctggccactggcagcgccatggggctgtgggaggtgaagaactgtacctcgttccgggcccgctacatctgccggcagagcctgggcactccagtgacgccggagctgccggggccagatcccacgcccagcctcactggctcctgtccccagggctgggcctcggacaccaaactccggtattgctataaggtgttcagctcagagcggctgcaggacaagaagagctgggtccaggcccagggggcctgccaggagctgggggcccagctgctgagcctggccagctacgaggaggagcactttgtggccaacatgctcaacaagatcttcggtgaatcagaacccgagatccacgagcagcactggttctggatcggcctgaaccgtcgggatcccagagggggtcagagttggcgctggagcgacggcgtagggttctcttaccacaatttcgaccggagccggcacgacgacgacgacatccgaggctgtgcggtgctggacctggcctccctgcagtgggtggccatgcagtgcgacacacagctggactggatctgcaagatccccagaggtacggacgtgcgggagcccgacgacagccctcaaggccgacgggaatggctgcgcttccaggaggccgagtacaagttctttgagcaccactccacgtgggcgcaggcgcagcgcatctgcacgtggttccaggccgagctgacctccgtgcacagccaggcagagctagacttcctgagccacaacttgcagaagttctcccgggcccaggagcagcactggtggatcggcctgcacacctctgagagcgatgggcgcttcagatggacagatggttccattataaacttcatctcctgggcaccaggcaaacctcggcctgtcggcaaggacaagaagtgcgtgtacatgacagccagccgagaggactggggggaccagaggtgcctgacagccttgccctacatctgcaagcgcagcaacgtcaccaaagaaacgcagcccccagacctgccaactacagccctggggggctgcccctctgactggatccagttcctcaacaagtgttttcaggtccagggccaggaaccccagagccgggtgaagtggtcagaggcacagttctcctgtgaacagcaagaggcccagctggtcaccatcacaaaccccttagagcaagcattcatcacagccagcctgcccaatgtgacctttgacctttggattggcctccatgcctcgcagagggacttccagtgggtggagcaggagcctttgatgtatgccaactgggcacctggggagccctctggccctagccctgctcccagtggcaacaaaccgaccagctgtgcggtggtcctgcacagcccctcagcccacttcactggccgctgggacgatcggagctgcacggaggagacccatggcttcatctgccagaagggcacggacccctccctgagcccgtccccagcagcgctgccccccgccccgggcactgagctctcctacctcaacggcaccttccggctgcttcagaagccgctgcgctggcacgatgccctcctgctgtgtgagagccacaatgccagcctggcctacgtgcccgacccctacacccaggccttcctcacgcaggctgcccgagggctgcgcacgccgctctggattgggctggctggcgaggagggctctcggcggtactcctgggtctcagaggagccgctgaactacgtgggctggcaggacggggagccgcagcagccggggggctgtacctacgtagatgtggacggggcctggcgcaccaccagctgtgacaccaagctgcagggggctgtgtgtggggttagcagtgggccccctcctccccgaagaataagctaccatggcagctgtccccagggactggcagactccgcgtggattcccttccgggagcactgctattctttccacatggagctgctgctgggccacaaggaggcgcgacagcgctgccagagagcgggtggggccgtcctgtctatcctggatgagatggagaatgtgtttgtctgggagcacctgcagagctatgagggccagagtcggggcgcctggctgggcatgaacttcaaccccaaaggaggcactctggtctggcaggacaacacagctgtgaactactccaactgggggcccccgggcttgggccccagcatgctgagccacaacagctgctactggattcagagcaacagcgggctatggcgccccggcgcttgcaccaacatcaccatgggtgtcgtctgcaagcttcctcgtgctgagcagagcagcttctccccatcagcgcttccagagaacccagcggccctggtggtggtgctgatggcggtgctgctgctcctggccttgctgaccgcagccctcatcctttaccggaggcgccagagcatcgagcgcggggcctttgagggtgcccgctacagccgcagcagctccagccccaccgaggccactgagaagaacatcctggtgtcagacatggaaatgaatgagcaacaagaatagagccaggcgcgtgggcagggccagggcgggaggagctggggagctggggccctgggtcagtctggccccccaccagctgcctgtccagttggcctatggaagggtgcccttgggagtcgctgttgggagccggagctgggcagagcctgggctggtggggtgccaccctcccacaagggctgggctgagacccagctgagtgcagcgtggcgtttccctttctgggggggcctgaggtcttgtcacctggtcctgtgcccccacaggaaccagaggtaggatgggagggggaacgagagcctctttctccccagagcccccggcccaggcctgttgatccgcgccccaggacccccttctttgcagagcccgaggagcctcccctgtcccctcgggcagatctgttgtgtctctcttcccacctggcagcctcagctctgtgcccctcaccctgctccctctcgccccttctctcccaccccttccttctgagccgggccctggggattggggagccctcttgttcctgatgagggtcagctgagggggctgagcatccatcactcctgtgcctgctggggtggctgtggggcgtggcaggaggggcctaggtgggttgggcctgagaaccagggcacgggtgtggtgtctgctgggctggagataagactggggagagacaccccaacctcccagggtgggagctgggccgggctgggatgtcatctcctgccgggcgggggagggctctgcccctggaagagtcccctgtggggaccaaaataagttccctaacatctccagctcctggctctggtttggagcaaggggaagggttgccagagtcctgggggccccagaggagcaggagtctgggagggcccagagttcaccctctagtggatccaggaggagcagcacccgagccctggagtggcccagtacccttccaagaggccacagtcccagccaggacaaagtatgcggcccatcctggtgcgacagcgtgggacaatgtgaacatggactcgaagacatggccctttctctgtagttgattttttaaatgtgccattattgttttt

SEQ ID NO: 1734 - DNA, 5709 bp, Homo sapiens
ggcacgagcggaggaggacgcgagccccttgcgggcggtcatcacagcccagcctcggggctgccacagcgcgttgcgcctgtgcgccctcggtccccgcgtccactgagcgccgcgctcggggatggggcccggccggccggcccccgcgccctggcctcgtcacctgctgcgctgcgtcctgctcctcgggtgcctgcacctcggccgtcccggcgcccctggggacgccgccctcccggaacccaacatcttcctcatcttcagccatggactgcagggctgcctggaggcccagggcgggcaggtcagagtcaccccggcttgcaataccagcctccctgcccagcgctggaagtgggtctcccgaaaccggctattcaacctgggtaccatgcagtgcctgggcacaggctggccaggcaccaacaccacggcctccctgggcatgtatgagtgtgaccgggaagcactgaatcttcgctggcattgtcgtacactgggtgaccagctgtccttgctcctgggggcccgcaccagcaacatatccaagcctggcacccttgagcgtggtgaccagacccgcagtggccagtggcgcatctacggcagcgaggaggacctatgtgctctgccctaccacgaggtctacaccatccagggaaactcccacggaaagccgtgcaccatccccttcaaatatgacaaccagtggttccacggctgcaccagcacgggccgcgaggatggtcacctgtggtgtgccaccacccaggactacggcaaagacgagcgctggggcttctgccccatcaagagtaacgactgcgagaccttctgggacaaggaccagctgactgacagctgctaccagtttaacttccagtccacgctgtcgtggagggaggcctgggccagctgcgagcagcagggtgcggatctgctgagcatcacggagatccacgagcagacctacatcaacggcctcctcactgggtacagctccaccctgtggatcggcttgaatgacttggacacgagcggaggctggcagtggtcggacaactcgcccctcaagtacctcaactgggagagtgaccagccggacaaccccagtgaggagaactgtggagtgatccgcactgagtcctcgggcggctggcagaaccgtgactgcagcatcgcgctgccctatgtgtgcaagaagaagcccaacgccacggccgagcccacccctccagacaggtgggccaatgtgaaggtggagtgcgagccgagctggcagcccttccagggccactgctaccgcctgcaggccgagaagcgcagctggcaggagtccaagaaggcatgtctacggggcggtggcgacctggtcagcatccacagcatggcggagctggaattcatcaccaagcagatcaagcaagaggtggaggagctgtggatcggcctcaacgatttgaaactgcagatgaattttgagtggtctgacgggagccttgtgagcttcacccactggcacccctttgagcccaacaacttccgggacagtctggaggactgtgtcaccatctggggcccggaaggccgctggaacgacagtccctgtaaccagtccttgccatccatctgcaagaaggcaggccagctgagccagggggccgccgaggaggaccatggctgccggaagggttggacgtggcacagcccatcctgctactggctgggagaagaccaagtgacctacagtgaggcccggcgcctgtgcactgaccatggctctcagctggtcaccatcaccaacaggttcgagcaggccttcgtcagcagcctcatctacaactgggagggcgagtacttctggacggccctgcaggacctcaacagcaccggctccttcttctggctcagtggggatgaagtcatgtacacccactggaaccgggaccagcccgggtacagccgtgggggctgcgtggcgctggccactggcagcgccatggggctgtgggaggtgaagaactgtacctcgttccgggcccgctacatctgccggcagagcctgggcactccagtgacgccggagctgccggggccagatcccacgcccagcctcactggctcctgtccccagggctgggcctcggacaccaaactccggtattgctataaggtgttcagctcagagcggctgcaggacaagaagagctgggtccaggcccagggggcctgccaggagctgggggcccagctgctgagcctggccagctacgaggaggagcactttgtggccaacatgctcaacaagatcttcggtgaatcagaacccgagatccacgagcagcactggttctggatcggcctgaaccgtcgggatcccagagggggtcagagttggcgctggagcgacggcgtagggttctcttaccacaatttcgaccggagccggcacgacgacgacgacatccgaggctgtgcggtgctggacctggcctccctgcagtgggtggccatgcagtgcgacacacagctggactggatctgcaagatccccagaggtacggacgtgcgggagcccgacgacagccctcaaggccgacgggaatggctgcgcttccaggaggccgagtacaagttctttgagcaccactccacgtgggcgcaggcgcagcgcatctgcacgtggttccaggccgagctgacctccgtgcacagccaggcggagctagacttcctgagccacaacttgcagaagttctcccgggcccaggagcagcactggtggatcggcctgcacacctctgagagcgatgggcgcttcagatggacagatggttccattataaacttcatctcctgggcaccaggcaaacctcggcctgtcggcaaggacaagaagtgcgtgtacatgacagccagccgagaggactggggggaccagaggtgcctgacagccttgccctacatctgcaagcgcagcaacgtcaccaaagaaacgcagcccccagacctgccaactacagccctggggggctgcccctctgactggatccagttcctcaacaagtgttttcaggtccagggccaggaaccccagagccgggtgaagtggtcagaggcacagttctcctgtgaacagcaagaggcccagctggtcaccatcacaaaccccttagagcaagcattcatcacagccagcctgcccaatgtgacctttgacctttggattggcctccatgcctcgcagagggacttccagtgggtggagcaggagcctttgatgtatgccaactgggcacctggggagccctctggccctagccctgctcccagtggcaacaaaccgaccagctgtgcggtggtcctgcacagcccctcagcccacttcactggccgctgggacgatcggagctgcacggaggagacccatggcttcatctgccagaagggcacggacccctccctgagcccgtccccagcagcgctgccccccgccccgggcactgagctctcctacctcaacggcaccttccggctgcttcagaagccgctgcgctggcacgatgccctcctgctgtgtgagagccacaatgccagcctggcctacgtgcccgacccctacacccaggccttcctcacgcaggctgcccgagggctgcgcacgccgctctggattgggctggctggcgaggagggctctcggcggtactcctgggtctcagaggagccgctgaactacgtgggctggcaggacggggagccgcagcagccggggggctgtacctacgtagatgtggacggggcctggcgcaccaccagctgtgacaccaagctgcagggggctgtgtgtggggttagcagtgggccccctcctccccgaagaataagctaccatggcagctgtccccagggactggcagactccgcgtggattcccttccgggagcactgctattctttccacatggagctgctgctgggccacaaggaggcgcgacagcgctgccagagagcgggtggggccgtcctgtctatcctggatgagatggagaatgtgtttgtctgggagcacctgcagagctatgagggccagagtcggggcgcctggctgggcatgaacttcaaccccaaaggaggcactctggtctggcaggacaacacagctgtgaactactccaactgggggcccccgggcttgggccccagcatgctgagccacaacagctgctactggattcagagcaacagcgggctatggcgccccggcgcttgcaccaacatcaccatgggtgtcgtctgcaagcttcctcgtgctgagcagagcagcttctccccatcagcgcttccagagaacccagcggccctggtggtggtgctgatggcggtgctgctgctcctggccttgctgaccgcagccctcatcctttaccggaggcgccagagcatcgagcgcggggcctttgagggtgcccgctacagccgcagcagctccagccccaccgaggccactgagaagaacatcctggtgtcagacatggaaatgaatgagcagcaagaatagagccaggcgcgtgggcagggccagggcgggaggagctggggagctggggccctgggtcagtctggccccccaccagctgcctgtccagttggcctatggaagggtgcccttgggagtcgctgttgggagccggagctgggcagagcctgggctggtggggtgccaccctcccacaagggctgggctgagacccagctgagtgcagcgtggcgtttccctttctgggggggcctgaggtcttgtcacctggtcctgtgcccccacaggaaccagaggtaggatgggagggggaacgagagcctctttctccccagagcccccggcccaggcctgttgatccgcgccccaggacccccttctttgcagagcccgaggagcctcccctgtcccctcgggcagatctgttgtgtctctcttcccacctggcagcctcagctctgtgcccctcaccctgctccctctcgccccttctctcccaccccttccttctgagccgggccctggggattggggagccctcttgttcctgatgagggtcagctgagggggctgagcatccatcactcctgtgcctgctggggtggctgtggggcgtggcaggaggggcctaggtgggttgggcctgagaaccagggcacgggtgtggtgtctgctgggctggagataagactggggagagacaccccaacctcccagggtgggagctgggccgggctgggatgtcatctcctgccgggcgggggagggctctgcccctggaagagtcccctgtggggaccaaaataagttccctaacatctccagctcctggctctggtttggagcaaggggaagggttgccagagtcctgggggccccagaggagcaggagtctgggagggcccagagttcaccctctagtggatccaggaggagcagcacccgagccctggagtggcccagtacccttccaagaggccacagtcccagccaggacaaagtatgcggcccatcctggtgcgacagcgtgggacaatgtgaacatggactcgaagacatggccctttctctgtagttgattttttaaatgtgccattattgtttttaaaaaaaaaggaaaaaagaaaagcaaacaaataaaacacctttaagaggcttgaaagaga

SEQ ID NO: 1735 - DNA, 1887 bp, Homo sapiens
ggggtatcgataagtttctttttttttttttttttgagacagaatctcgctctgtcgcccaggctggaatgcagtggcgcgatctctgctcactacaagctccgcctcccgggttcacgccattctcccgcctcggcctcccaaagtgctgggattacaggcgtgagccaccgcgcccggccttaaaaattgaatctgtagcttaggccatccaaattttataaatccaaattaactttagaatgtttctattactttcacttttacatatataaattttaagtgtcctgattggctgaacaatatctcacatcaaatgctttgcctggaaatagatatcccactggggatagtggtgtgtaaactatgacttggacaattctatatactcaagcaccataaaaagtatgcagttgaaaagaaaatcaaagttgactcctgggtgccaactaaatattcaaatcaggtactcatccttatcagctaaattcattttcaccaggaacagaccaccaaataaattattttatcctaataactagttttgaagcagtgtaattactctggaagaaggctctaaaaagtcatgattcccccactattttgaaatgtatcctctaacaaggatcattatagtgtaatcttaatttttatgtttatcaagatgaaatcttgtttgaattgtgatattataaaaggggactcaaaaatccaagcagtctactgtgtttaaattaacaccacaaccttccttatcagattataagagtagaaaaattaacacttggtgtgtgaatcttcaggaaaatgagctatttcataagctcaaacaagcagcttccttttccagagaatatagaattatattatggtctccttaaatgtttagtagctcttatggtcacagcatttttaatctccctatggcatctttatggaataattttctaaagggtaattctctactaaaaatatcagaccccgaccatatttaatgtggagagcaataccctcttagaaagaaaatacattgactcatacacttgttaaaagttaataaagaaatagctcatttttaaagccggaagtttatggtctctgcatcgtcaatttaatttaagcattgctgagacaatctttaatctactcccctttttgtaataccttatttatggtgcattttcatttttatttgggggaaacgttagcccaacagagccggcagatgaaagtgttgaaaagaggtcaaatggaaacaaaggctcttacccgctgtatttcagacaggactgaggcacttagccgaggagccactgggttattagattaatttcaaaagagcttttacaagttgcttaattcctttttttttttttttttcaaaaacccatgaaccacaaactcaaatttctcctcaaatggggttaatctgacaaatgaggcatggacccagccttgtggaaaaagcattccacgctaatgagatcttggtctttcttgtgaggctacgttatttatgtaaatatgtctggaggcaccttctctaagcttttagttttctatgatctattagtttagtgtttattaaagaatcaaatgtatagaattaccaggcattcgtggggaatgctgtgtagcaaatgtaaaactgacctgctcggaagaaacgtaggaacgcttcaaacccactgtaatgtttggtttgagattattttcattgctttgagagtgaactgcctaagagtaggccttataataaatgctatgtgcgtcttcagtagttccaagctaaagcaatttggcattctcccactgtgatttgtgacttttaaacccacaaaataaaagctttttggtattgataaaaagaaaaaaaaaaaaaaaaaa

SEQ ID NO: 1736 - DNA, 2147 bp, Homo sapiens
  misc_feature 1176, 1177, 1178, 1179, 1180, 1181, 1182, 1183, 1184, 1185,1186, 1187, 1188, 1189, 1190, 1191, 1192, 1193, 1194, 1195,1196, 1197, 1198, 1199, 1200: n = A,T,C or G
ttaaaaattgaatctgtagcttaggccatccaaattttataaatccaaattaactttagaatgtttctattactttcacttttacatatataaattttaagtgtcctgattggctgaacaagtatctcacatcaaatgctttgcctggaaatagatatcccactggggatagtggtgtgtaaactatgacttggacaattctatatactcaagcaccataaaaagtatgcagttgaaaagaaaatcaaagttgattcctgggtgccaactaaatattcaaatcaggtactcatccttatcagctaaattcattttcaccaggaacagaccaccaaataaattattttatcctaataactagttttgaagcagtgtaattactctggaagaaggctctaaaaagtcatgattcccccactattttgaaatgtatcctctaacaaggatcattatagtgtaatcttaatttttatgttttatcaagatgaaatcttgtttgaattgtgatattataaaaggggactcaaaaatccaagcagtctactgtgtttaaattaacaccacaaccttccttatcagattataagagtagaaaaattaacacttggtgtgtgaatcttcaggaaaatgagctatttcataagctcaaacaagcagcttccttttccagagaatatagaattatattatggtctccttaaatgtttagtagctcttatggtcacagcatttttaatctccctatggcatctttatggaataattttctaaagggtaattctctactaaaaatatcagaccccgaccatatttaatgtggagagcaataccctcttagaaagaaaatacattgactcatacacttgttaaaagttaataaagaaatagctcatttttaaagccggaagtttatggtctctgcatcgtcaatttaatttaagcattgctgagacaatctttaatctactcccctttttgtaataccttatttatggtgcattttcatttttatttgggggaaacgttagcccaacagagccggcagatgaaagtgttgaaaagaggtcaaatggaaacaaaggctcttacccgctgtatttcagacaggactgaggcacttagccgaggagccactgggttattagattaatttcaaaagagcttttacaagttgcnnnnnnnnnnnnnnnnnnnnnnnnncaaaaacccatgaaccacaaactcaaatttctcctcaaatggggttaatctgacaaatgaggcatggacccagccttgtggaaaaagcattccacgctaatgagatcttggtctttcttgtgaggctacgttatttatgtaaatatgtctggaggcaccttctctaagcttttagttttctatgatctattagtttagtgtttattaaagaatcaaatgtatagaattaccaggcattcgtggggaatgctgtgtagcaaatgtaaaactgacctgctcggaagaaacgtaggaacgcttcaaacccactgtaatgtttggtttgagattattttcattgctttgagagtgaactgcctaagagtaggccttataataaatgctatgtgcgtcttcagtagttccaagctaaagcaatttggcattctcccactgtgatttgtgacttttaaacccacaaaataaaagctttttggtattgattgtttttaattaaaaatacttccaagtataaattgaaacggatgccacccttgaagatttactggcgggaatgctcactcttgtcgttttcctcagtatcgttcatgtctttggcaacaagaacacctgatgaaagcaagcaatgctcagttcccatcaacatttctagttagggggattctcataaccccacagtttacctgagaaagttttctgtgttagaagaatggggtcgagagtattaccttttagctcagtgtggccgggccttttgttgcagtcaaatggcaaatacgcactccttgaaatggcttcttttatttggttttgttttcttagacttataaatttgaaaagaatgcaatttaaaaagtgatttctcacaaagagtaaatatgccttttgcaaatcaatttttgtaacaagttatttatatgatattacttaataaactggtttttttc

SEQ ID NO: 1737 - DNA, 6214 bp, Homo sapiens
ggcacgagcggaggaggacgcgagccccttgcgggcggtcatcacagcccagcctcggggctgccacagcgcgttgcgcctgtgcgccctcggtccccgcgtccactgagcgccgcgctcggggatggggcccggccggccggcccccgcgccctggcctcgtcacctgctgcgctgcgtcctgctcctcgggtgcctgcacctcggccgtcccggcgcccctggggacgccgccctcccggaacccaacrtcttcctcatcttcagccatggactgcagggctgcctggaggcccagggcgggcaggtcagagtcaccccggcttgcaataccagcctccctgcccagcgctggaagtgggtctcccgaaaccggctattcaacctgggtaccatgcagtgcctgggcacaggctggccaggcaccaacaccacggcctccctgggcatgtatgagtgtgaccgggaagcactgaatcttcgctggcattgtcgtacactgggtgaccagctgtccttgctcctgggggcccgcaccagcaacatatccaagcctggcacccttgagcgtggtgaccagacccgcagtggccagtggcgcatctacggcagcgaggaggacctatgtgctctgccctaccacgaggtctacaccatccagggaaactcccacggaaagccgtgcaccatccccttcaaatatgacaaccagtggttccacggctgcaccagcacgggccgcgaggatggtcacctgtggtgtgccaccacccaggactacggcaaagacgagcgctggggcttctgccccatcaagagtaacgactgcgagaccttctgggacaaggaccagctgactgacagctgctaccagtttaacttccagtccacgctgtcgtggagggaggcctgggccagctgcgagcagcagggtgcggatctgctgagcatcacggagatccacgagcagacctacatcaacggcctcctcactgggtacagctccaccctgtggatcggcttgaatgacttggacacgagcggaggctggcagtggtcggacaactcgcccctcaagtacctcaactgggagagtgaccagccggacaaccccagtgaggagaactgtggagtgatccgcactgagtcctcgggcggctggcagaaccgtgactgcagcatcgcgctgccctatgtgtgcaagaagaagcccaacgccacggccgagcccacccctccagacaggtgggccaatgtgaaggtggagtgcgagccgagctggcagcccttccagggccactgctaccgcctgcaggccgagaagcgcagctggcaggagtccaagaaggcatgtctacggggcggtggcgacctggtcagcatccacagcatggcggagctggaattcatcaccaagcagatcaagcaagaggtggaggagctgtggatcggcctcaacgatttgaaactgcagatgaattttgagtggtctgacgggagccttgtgagcttcacccactggcacccctttgagcccaacaacttccgggacagtctggaggactgtgtcaccatctggggcccggaaggccgctggaacgacagtccctgtaaccagtccttgccatccatctgcaagaaggcaggccagctgagccagggggccgccgaggaggaccatggctgccggaagggttggacgtggcacagcccatcctgctactggctgggagaagaccaagtgacctacagtgaggcccggcgcctgtgcactgaccatggctctcagctggtcaccatcaccaacaggttcgagcaggccttcgtcagcagcctcatctacaactgggagggcgagtacttctggacggccctgcaggacctcaacagcaccggctccttcttctggctcagtggggatgaagtcatgtacacccactggaaccgggaccagcccgggtacagccgtgggggctgcgtggcgctggccactggcagcgccatggggctgtgggaggtgaagaactgtacctcgttccgggcccgctacatctgccggcagagcctgggcactccagtgacgccggagctgccggggccagatcccacgcccagcctcactggctcctgtccccagggctgggcctcggacaccaaactccggtattgctataaggtgttcagctcagagcggctgcaggacaagaagagctgggtccaggcccagggggcctgccaggagctgggggcccagctgctgagcctggccagctacgaggaggagcactttgtggccaacatgctcaacaagatcttcggtgaatcagaacccgagatccacgagcagcactggttctggatcggcctgaaccgtcgggatcccagagggggtcagagttggcgctggagcgacggcgtagggttctcttaccacaatttcgaccggagccggcacgacgacgacgacatccgaggctgtgcggtgctggacctggcctccctgcagtgggtggccatgcagtgcgacacacagctggactggatctgcaagatccccagaggtacggacgtgcgggagcccgacgacagccctcaaggccgacgggaatggctgcgcttccaggaggccgagtacaagttctttgagcaccactccacgtgggcgcaggcgcagcgcatctgcacgtggttccaggccgagctgacctccgtgcacagccaggcrgagctagacttcctgagccacaacttgcagaagttctcccgggcccaggagcagcactggtggatcggcctgcacacctctgagagcgatgggcgcttcagatggacagatggttccattataaacttcatctcctgggcaccaggcaaacctcggcctgtcggcaaggacaagaagtgcgtgtacatgacagccagccgagaggactggggggaccagaggtgcctgacagccttgccctacatctgcaagcgcagcaacgtcaccaaagaaacgcagcccccagacctgccaactacagccctggggggctgcccctctgactggatccagttcctcaacaagtgttttcaggtccagggccaggaaccccagagccgggtgaagtggtcagaggcacagttctcctgtgaacagcaagaggcccagctggtcaccatcacaaaccccttagagcaagcattcatcacagccagcctgcccaatgtgacctttgacctttggattggcctccatgcctcgcagagggacttccagtgggtggagcaggagcctttgatgtatgccaactgggcacctggggagccctctggccctagccctgctcccagtggcaacaaaccgaccagctgtgcggtggtcctgcacagcccctcagcccacttcactggccgctgggacgatcggagctgcacggaggagacccatggcttcatctgccagaagggcacggacccctccctgagcccgtccccagcagcgctgccccccgccccgggcactgagctctcctacctcaacggcaccttccggctgcttcagaagccgctgcgctggcacgatgccctcctgctgtgtgagagccacaatgccagcctggcctacgtgcccgacccctacacccaggccttcctcacgcaggctgcccgagggctgcgcacgccgctctggattgggctggctggcgaggagggctctcggcggtactcctgggtctcagaggagccgctgaactacgtgggctggcaggacggggagccgcagcagccggggggctgtacctacgtagatgtggacggggcctggcgcaccaccagctgtgacaccaagctgcagggggctgtgtgtggggttagcagtgggccccctcctccccgaagaataagctaccatggcagctgtccccagggactggcagactccgcgtggattcccttccgggagcactgctattctttccacatggagctgctgctgggccacaaggaggcgcgacagcgctgccagagagcgggtggggccgtcctgtctatcctggatgagatggagaatgtgtttgtctgggagcacctgcagagctatgagggccagagtcggggcgcctggctgggcatgaacttcaaccccaaaggaggcactctggtctggcaggacaacacagctgtgaactactccaactgggggcccccgggcttgggccccagcatgctgagccacaacagctgctactggattcagagcaacagcgggctatggcgccccggcgcttgcaccaacatcaccatgggtgtcgtctgcaagcttcctcgtgctgagcagagcagcttctccccatcagcgcttccagagaacccagcggccctggtggtggtgctgatggcggtgctgctgctcctggccttgctgaccgcagccctcatcctttaccggaggcgccagagcatcgagcgcggggcctttgagggtgcccgctacagccgcagcagctccagccccaccgaggccactgagaagaacatcctggtgtcagacatggaaatgaatgagcarcaagaatagagccaggcgcgtgggcagggccagggcgggaggagctggggagctggggccctgggtcagtctggccccccaccagctgcctgtccagttggcctatggaagggtgcccttgggagtcgctgttgggagccggagctgggcagagcctgggctggtggggtgccaccctcccacaagggctgggctgagacccagctgagtgcagcgtggcgtttccctttctgggggggcctgaggtcttgtcacctggtcctgtgcccccacaggaaccagaggtaggatgggagggggaacgagagcctctttctccccagagcccccggcccaggcctgttgatccgcgccccaggacccccttctttgcagagcccgaggagcctcccctgtcccctcgggcagatctgttgtgtctctcttcccacctggcagcctcagctctgtgcccctcaccctgctccctctcgccccttctctcccaccccttccttctgagccgggccctggggattggggagccctcttgttcctgatgagggtcagggcagatgaaagtgttgaaaagaggtcaaatggaaacaaaggctcttacccgctgtatttcagacaggactgaggcacttagccgaggagccactgggttattagattaatttcaaaagagcttttacaagttgcttaattccttttttttttttttttttttcaaaaacccatgaaccacaaactcaaatttctcctcaaatggggttaatctgacaaatgaggcatggacccagccttgtggaaaaagcattccacgctaatgagatcttggtctttcttgtgaggctacgttatttatgtaaatatgtctggaggcaccttctctaagcttttagttttctatgatctattagtttagtgtttattaaagaatcaaatgtatagaattaccaggcattcgtggggaatgctgtgtagcaaatgtaaaactgacctgctcggaagaaacgtaggaacgcttcaaacccactgtaatgtttggtttgagattattttcattgctttgagagtgaactgcctaagagtaggccttataataaatgctatgtgcgtcttcagtagttccaagctaaagcaatttggcattctcccactgtgatttgtgacttttaaacccacaaaataaaagctttttggtattgattgtttttaattaaaaatacttccaagtataaattgaaacggatgccacccttgaagatttactggcgggaatgctcactcttgtcgttttcctcagtatcgttcatgtctttggcaacaagaacacctgatgaaagcaagcaatgctcagttcccatcaacatttctagttagggggattctcataaccccacagtttacctgagaaagttttctgtgttagaagaatggggtcgagagtattaccttttagctcagtgtggccgggccttttgttgcagtcaaatggcaaatacgcactccttgraatggcttcttttatttggttttgttttcttagacttataaatttgaaaagaatgcaatttaaaaagtgatttctcacaaagagtaaatatgccttttgcaaatcaatttttgtaacaagttatttatatgatattacttaataaactggtttttttc

SEQ ID NO: 1738 - protein, 1479 aa, Homo sapiens
MGPGRPAPAPWPRHLLRCVLLLGCLHLGRPGAPGDAALPEPNVFLIFSHGLQGCLEAQGGQVRVTPACNTSLPAQRWKWVSRNRLFNLGTMQCLGTGWPGTNTTASLGMYECDREALNLRWHCRTLGDQLSLLLGARTSNISKPGTLERGDQTRSGQWRIYGSEEDLCALPYHEVYTIQGNSHGKPCTIPFKYDNQWFHGCTSTGREDGHLWCATTQDYGKDERWGFCPIKSNDCETFWDKDQLTDSCYQFNFQSTLSWREAWASCEQQGADLLSITEIHEQTYINGLLTGYSSTLWIGLNDLDTSGGWQWSDNSPLKYLNWESDQPDNPSEENCGVIRTESSGGWQNRDCSIALPYVCKKKPNATAEPTPPDRWANVKVECEPSWQPFQGHCYRLQAEKRSWQESKKACLRGGGDLVSIHSMAELEFITKQIKQEVEELWIGLNDLKLQMNFEWSDGSLVSFTHWHPFEPNNFRDSLEDCVTIWGPEGRWNDSPCNQSLPSICKKAGQLSQGAAEEDHGCRKGWTWHSPSCYWLGEDQVTYSEARRLCTDHGSQLVTITNRFEQAFVSSLIYNWEGEYFWTALQDLNSTGSFFWLSGDEVMYTHWNRDQPGYSRGGCVALATGSAMGLWEVKNCTSFRARYICRQSLGTPVTPELPGPDPTPSLTGSCPQGWASDTKLRYCYKVFSSERLQDKKSWVQAQGACQELGAQLLSLASYEEEHFVANMLNKIFGESEPEIHEQHWFWIGLNRRDPRGGQSWRWSDGVGFSYHNFDRSRHDDDDIRGCAVLDLASLQWVAMQCDTQLDWICKIPRGTDVREPDDSPQGRREWLRFQEAEYKFFEHHSTWAQAQRICTWFQAELTSVHSQAELDFLSHNLQKFSRAQEQHWWIGLHTSESDGRFRWTDGSIINFISWAPGKPRPVGKDKKCVYMTASREDWGDQRCLTALPYICKRSNVTKETQPPDLPTTALGGCPSDWIQFLNKCFQVQGQEPQSRVKWSEAQFSCEQQEAQLVTITNPLEQAFITASLPNVTFDLWIGLHASQRDFQWVEQEPLMYANWAPGEPSGPSPAPSGNKPTSCAVVLHSPSAHFTGRWDDRSCTEETHGFICQKGTDPSLSPSPAALPPAPGTELSYLNGTFRLLQKPLRWHDALLLCESHNASLAYVPDPYTQAFLTQAARGLRTPLWIGLAGEEGSRRYSWVSEEPLNYVGWQDGEPQQPGGCTYVDVDGAWRTTSCDTKLQGAVCGVSSGPPPPRRISYHGSCPQGLADSAWIPFREHCYSFHMELLLGHKEARQRCQRAGGAVLSILDEMENVFVWEHLQSYEGQSRGAWLGMNFNPKGGTLVWQDNTAVNYSNWGPPGLGPSMLSHNSCYWIQSNSGLWRPGACTNITMGVVCKLPRAEQSSFSPSALPENPAALVVVLMAVLLLLALLTAALILYRRRQSIERGAFEGARYSRSSSSPTEATEKNILVSDMEMNEQQE

SEQ ID NO: 1739 - protein, 1479 aa, Homo sapiens [sequence omitted]
